(19) United States
(12) Patent Application Publication
(10) Pub. No.: US 2003/0096264 A1
(43) Pub. Date: May 22, 2003

(54) Multi-parameter high throughput screening assays (MPHTS)

(75) Inventors: C. Anthony Altar, Garrett Park, MD (US); Jeffrey A. Brockman, Frederick, MD (US); David Evans, N. Potomac, MD (US); Derek Hook, Gaithersburg, MD (US); Leszek J. Klimczak, Gaithersburg, MD (US); Pascal Laeng, Washington, DC (US); Michael Palfreyman, Annapolis, MD (US); Prithi Rajan, Rockville, MD (US)

Correspondence Address: DARBY & DARBY P.C., P. O. BOX 5257, NEW YORK, NY, 10150-5257, US

(73) Assignee: Psychiatric Genomics, Inc.

(21) Appl. No.: 10/175,523

(22) Filed: Jun. 18, 2002

Related U.S. Application Data
(60) Provisional application No. 60/299,151, filed on Jun. 18, 2001.
(60) Provisional application No. 60/317,828, filed on Sep. 7, 2001.
(60) Provisional application No. 60/325,150, filed on Sep. 25, 2001.
(60) Provisional application No. 60/333,047, filed on Nov. 14, 2001.
(60) Provisional application No. 60/349,936, filed on Jan. 18, 2002.
(60) Provisional application No. 60/361,834, filed on Mar. 4, 2002.

(51) Int. Cl. C12Q 1/68; G06F 19/00; G01N 33/48; G01N 33/50

(52) U.S. Cl. 435/6; 702/20

(57) ABSTRACT

The present invention relates to screening methods and assays that are referred to herein as multi-parameter hight throughput screening (MPHTS) assays. These MPHTS assays are useful for identifying candidate pharmaceutical compounds. In particular, the screening methods of this invention may be used to identify compounds that have potential therapeutic benefits for the treatment of neuropscyhiatric and neurodegenerative disorders, including schizophrenia, bipolar affective disorder (BAD), autism and Alzheimer's disease to name a few.

### MULTI-PARAMETER HIGH THROUGHPUT SCREENING ASSAYS (MPHTS)

[0001] Priority is claimed under 35 U.S.C. § 119(e) to the following United States provisional patent applications: Serial No. 60/299,151 filed Jun. 18, 2001; Serial No. 60/317,828, filed Sep. 7, 2001; Serial No. 60/325,150, filed Sep. 25, 2001; Serial No. 60/333,047, filed Nov. 14, 2001; Serial No. 60/349,936, filed Jan. 18, 2002; and Serial No. 60/361,834, filed Mar. 4, 2002. Each of these priority applications is incorporated herein by reference, in its entirety.

### 1. FIELD OF THE INVENTION

[0002] The present invention relates to screening methods, referred to herein as multi-parameter high throughput screening (MPHTS), that are useful for identifying candidate pharmaceutical compounds. In particular, the screening methods of this invention are preferably used to identify compounds that have potential therapeutic benefit in the treatment of neuropsychiatric and neurodegenerative disroders, including schizophrenia, bipolar affective disorder (BAD), autism, Alzheimer's Disease, Parkinson's Disease, etc.

[0003] The invention additionally relates to compositions and methods that are useful for treating and diagnosing such disorders and, in particular, to genes that are differentially expressed in individuals affected by (i.e., having) a neuropsychiatric disorder. Accordingly, the MPHTS methods of the invention include screening assays that use those genes to identify compounds having potential therapeutic benefits in the treatment of neuropsychiatric disorder. The invention also provides assays, including diagnostic assays, for determining whether an individual has or is susceptible to a neuropsychiatric disorder, by measuring the expression level of one or more of these genes.

### 2. BACKGROUND OF THE INVENTION

[0004] Mental health disorders represent the second most frequent cause of morbidity and premature mortality. According to the Surgeon General's report in 1999, approximately one in five Americans will have a mental or addictive disorder in any one year. Yet, only about 40% of those affected receive a correct diagnosis and appropriate treatment, emphasizing the magnitude of problem and the significant unmet medical need. In the industrialized world, more than 100 million people suffer from some disorder of the brain or nervous system and account for the majority of hospitalizations and long term care.

[0005] Schizophrenia and bipolar disorder are two examples of neuropsychiatric disorders that are particularly severe and often debilitating. Currently, individuals may be evaluated for these and other neuropsychiatric disorders using criteria set forth in the most recent version of the American Psychiatric Association's Diagnostic and Statistical Manual of Mental Disorders (DSM-IV). Schizophrenia, for example, is typically characterized by hallucinations, delusions, disorganized thought and various cognitive impairments. A number of anatomical abnormalities that are associated with the disease have been identified, including cellular aberrations such as decreased neuronal size, increased cellular packing density and distortions in neuronal orientation (see, for example, Arnold & Trojanowski, Acta Neuropathol. (Berl) 1996, 92:217-231; Harrison, Brain 1999, 122:593-624). Alterations in various neurotransmitter pathways and presynaptic components have also been implicated in neuropsychiatric disorders (see, e.g., Harrison, supra; and Benes, Brain Res. Brain Res. Rev. 2000, 31:251-269).

[0006] Genetic data, for example from family, twin and adoption studies, have suggested that there may be a significant genetic basis to schizophrenia and other neuropsychiatric disorders (see, e.g., McGuffin et al., Lancet 1995, 346:678-682). However, most if not all neuropsychiatric disorders appear to result from combined effects of multiple genes and environmental factors (McGuffin et al., supra). Traditional genetic methods such as linkage analysis, association studies of candidate genes, and mapping of cytogenetic abnormalities, which have been used successfully to identify genes involved in many monogenetic disorders, have been much less successful at identifying genes involved in neuropsychiatric disorders. Polygenetic models of inheritance and linkage analysis studies have instead postulated that several genes might confer susceptibility to neuropsychiatric disorders such as schizophrenia. Other studies, which analyze genome-wide expression, have identified several genes whose expression is dysregulated in brains of individuals suffering from schizophrenia (Hakak et al., Proc. Natl. Acad. Sci. USA 2001, 98:4746-4751).

[0007] The complex polygenetic nature of neuropsychiatric disorders, coupled with the subtle structural and cellular changes they entail, have greatly confounded efforts to identify and understand the molecular nature of these disorders. As a result, drugs and other therapeutic treatments that are currently available for these disorders are the results of serendipitous clinical observations made over the past forty years, rather than the outcome of any rational or efficient strategy for drug design and discovery. Yet, the treatments that are available for these disorders frequently have severe or even debilitating side affects, and may not work for all individuals suffering from a particular neuropsychiatric disorder. For example, valproate and lithium are chemical agents commonly used clinically to treat symptoms associated with bipolar disorder. However, many patients are refractory to these treatments, become tolerant to them, or show signs of toxicity. Moreover, valproate is a known teratogen, making it unsuitable for treating pregnant women.

[0008] Simply put, traditional methods of drug discovery do not directly address the polygenic aspects of these disorders. Such traditional strategies generally involve the identification of a single drug target (e.g., in animal studies) against which drugs may be screened in a non-neuronal, overly simplistic assay system. Yet, because neuropsychiatric disorders actually involve multiple pathways that interact with each other, the most effective drugs actually work on multiple systems. For example, clozapine (Clozaril™) is an antipsychotic drug with antagonistic actions on several disparate receptors, including those for dopamine, serotonin, norepinephrine, acetylcholine and histamine. Other complex disorders are often treated by administering combinations of multiple drugs, in a type of therapy referred to here as “polypharmacology”.

[0009] There continues to exist, therefore, a need for effective drugs and other therapies for treating neuropsychiatric disorders. In particular, there is a need for systematic and efficient methods that can be used to identify and evaluate potential new therapies for disorders, such as neuropsychiatric disorders, that involve multiple interactions between different constituents.

[0010] The citation and/or discussion of a reference in this section, and throughout the text of this application, shall not be construed as an admission that such reference is prior art to this invention.

### 3. SUMMARY OF THE INVENTION

[0011] The present invention provides methods and compositions which may be used to identify compounds (e.g., novel drug therapies) for treating various diseases and disorders. For example, the methods and compositions of this invention are particularly amendable and useful for screening assays to identify compounds that may be useful in novel, improved drug therapeis for treating a neuropsychiatric disorder, including but not limited to bipolar affective disorder (BAD), schizophrenia and autism.

[0012] In particular, the invention relates to and provides novel screening methods, referred to herein as Multi-Parameter High Throughput Screening (MPHTS). Briefly, these methods pertain to the combination of data generated from gene expression profiling coupled with methods for the systematic analysis and/or employment of such data. Using the methods and compositions described in this specification, large numbers of candidate compounds may be screened in vitro to identify ones that are particularly suitable and promising as novel therapeutic agents, e.g., for treating a neuropsychiatric disorder. For descriptive purposes, these assays comprise at least two tiers. The first tier involves the identification of genes involved in a particular disorder of interest while the second tier inovlves the implementation of systematic methods to screen test compounds.

[0013] Accordingly, the invention provides methods for selecting one or more “efficacy genes” that are indicative of an effective therapy for treating a disease or disorder and may therefore be used, e.g., in screening assays to identify new therapeutic compounds. In preferred embodiments, such methods comprise steps of: identifying a plurality of disease signature genes and identifying a plurality of drug signature genes, followed by obtaining a score value for each of these genes that is a function of each gene's differential expression in the disease signature compared to its expression in the drug signature.

[0014] Such “disease signature genes” are characterized, in particular, by the fact that each disease signature gene is differentially expressed in a cell or tissue from an individual affected with the disease or disorder of interest compared to its expression in a cell or tissue from an individual not having the disease or disorder of interest. Similarly, the “drug signature genes” are characterized by the fact that each drug signature gene is differentially expressed in a cell or tissue contacted with the given therapeutic compound compared to expression in a cell or tissue not contacted with the given therapeutic compound.

[0015] Once scorred, disease signature and drug signature genes having the highest score(s) may then be selected as efficacy genes. In particular, genes having the highest score value(s) will be indicative of successful drugs for treating the disease or disorder of interest and are therefore particularly amendable for use, e.g., in drug screening assays.

[0016] Although these methods may be used to select efficacy genes for any disease or disorder, in particularly preferred embodiments they are used to select efficacy genes for a neuropsychiatric disorder, such as bipolar affective disorder (BAD), schizophrenia or autism. Exemplary, given therapeutic compounds which may be used (e.g., to obtain a drug signature) inlude valproate, carbamazapine, lithium and vasoactive intestinal polypeptide (VIP) to name a few.

[0017] As an example and not by way of limitation, drug signature genes may be selected, e.g., from SEQ ID NOS:1-12, 25-55, or 56-118 (for valproate). In other embodiments, the given therpeutic compound may be VIP and drug signature genes may be selected from SEQ ID NOS:163-169. Examplary disease signature genes that may be used in these methods include, but are not limited to, SEQ ID NOS:1-24 and/or 119-148 (for schizophrenia), and SEQ ID NOS:149-161 and 135 (for BAD).

[0018] In still other embodiments, the invention also provides screening methods for identifying a compound to treat a disease or disorder (e.g., a neuropschiatric disorder such as BAD, schizophrenia or autism). These methods preferably involve steps of contacting a cell with a test compound, determining expression of one or more efficacy genes (selected as described, supra), and comparing the expression to expression in a cell that is not contacted with the test compound. Changes in the expression of the one or more efficacy genes that are consistent with a therapeutic benefit (as described in this specification, infra) then indicate that the test compound is useful for treating the disease or disorder of interest. For example, in particularly preferred embodiments, the screening methods of this invention are implemented using one or more of the efficacy genes provided in Table 13, below.

### 4. BRIEF DESCRIPTION OF THE DRAWINGS

[0019] FIGS. 1A-1B compare an exemplary multi-parameter high throughput screening (MPHTS) assay of this invention with traditional, low throughput screening assays currently available for identifying new therapeutic compounds, e.g., for the treatment of neuropsychiatric disorders.

[0020] FIG. 2 shows an exemplary output from the Principle Component Analysis of gene expression data, revealing clustering of gene expression based on both tissue type and disease.

[0021] FIG. 3 is a bar graph indicating the differential expression levels measured by RT-PCR for the genes nidogen (NID), silver (SIL), dopamine β-hydroxylase (DBH), dopa decarboxylase (DDC) and chromogranin B (CG-B) in NBFL cells exposed to valproate, relative to expression levels in NBFL cells not exposed to that compound.

[0022] FIG. 4 is a plot indicating changes in expression observed for a plurality of different genes (each represented by a single point on the plot) in the hippocampus of rats treated with valproate compared to rats treated with a vehicle only.

[0023] FIG. 5 is a plot indicating changes in expression observed for each of the genes Silver (SEQ ID NO:26), Nidogen (SEQ ID NO:25), and Chromogranin B (SEQ ID NO:55) in NBFL cells exposed to 5, 50 and 500 μM valproate. Changes in expression were measured using a commercial Xpress™ screening platform (available from Tropix, Bedford Mass.) and are plotted as the ratio of expression in treated vs. untreated cells.

[0024] FIG. 6 is a plot is a plot indicating changes in expression observed for each of the genes Nidogen (SEQ ID NO:25), Silver (SEQ ID NO:26), Chromagranin B (SEQ ID NO:55), GAP43 (SEQ ID NO:162) and Actin in NBFL cells that were treated with 5, 25, 50, 250 or 500 μM valproate. Changes in gene expression were measured a commercial Multiplexed Molecular Profiling array platform (available from High Throughput Genomics, Inc., Tucson Ariz.) and are plotted as the ratio of expression in treated vs. untreated cells.

[0025] FIGS. 7A-7D plot the fold change in chemiluminescence as a measure of gene expression relative to expression of a control gene, GAPDH. Plate well ID is indicated along the horizontal axis for each of four genes: Nidogen (FIG. 7A), Silver (FIG. 7B), Chromogranin B (FIG. 7C) and GAP43 (FIG. 7D). The dark grey horizontal line in each figure indicates the gene expression level previously measured in the presence of 500 μM of Valproate, whereas the light grey horizontal line indicates the average expression level measured in the absence of any test compound(s) (i.e., in media control). The star indicates a compound, located in well A10, with activity identical to the activity previously observed with the drug Valproate.

### 5. DETAILED DESCRIPTION OF THE INVENTION

[0026] To date, the identification of therapeutic compounds to treat neuropsychiatric disorders has depended almost entirely on serendipity. That is to say, effective drugs and other therapies for such disorders have traditionally been discovered by chance and not as the result of any directed systematic screening method. Indeed, the complex polygenetic nature of neuropsychiatric disorders, the subtle structural and cellular changes that they entail, and the difficulties in diagnosing and monitoring these disorders have made traditional drug screening methods extremely difficult if not impracticable. The present invention therefore seeks to overcome these and other problems by providing novel screening methods, referred to herein as Multi-Parameter High Throughput Screening (MPHTS). The MPHTS methods are ideally suited for identifying effective and/or promising therapeutic compounds to treat neuropsychiatric disorders, including but not limited to schizophrenia, bipolar affective disorder (BAD), and autism. In still other embodiments, the methods may be used for identifying effective and/or promising therapeutic compounds to treat neurodegenerative disorders, such as Alzheimer's Disease and Parkinson's Disease.

[0027] Briefly, the MPHTS approach described herein below pertains to the combination of data generated from gene expression profiling coupled with methods for the systematic analysis and/or employment of such data. Using the MPHTS methods described herein, large numbers of candidate compounds may be screened (e.g., in vitro) to identify ones that are particularly promising (and, as such, most likely to be suitable) for treating a neuropsychiatric disorder in vivo (e.g, in an individual such as a patient). For descriptive purposes, these assays comprise at least two tiers. The first tier involves the determination of genes involved in a particular disorder, which is preferably a neuropsychiatric disorder. The second tier involves the implementation of systematic methods to screen test compounds. These screening methods may be either existing assays that are already known in the art, or novel assays described here. Preferably, however, the screening methods used in MPHTS will be automated and/or high-throughput assays, so that a large number of test compounds (e.g., from a library) may be rapidly screened with a minimal amount of labor and effort.

[0028] FIGS. 1A-1B compare an exemplary MPHTS assay of the invention with traditional, low throughput screening assays currently available for identifying therapeutic compounds, e.g., to treat neuropsychiatric disorders. In traditional low throughput screening assays (FIG. 1A) only one compound may be screened at a time for an ability to interact with a single target. In reality, however, neuropsychiatric disorders involve complex interactions between (1) a therapeutic compound, and (2) several, perhapse numersous, different targets and their corresponding biological pathways. Thus, many compounds identified in such traditional assays fail to successfully treat the desired disorder. FIG. 1B schematically illustrates steps in an exemplary MPHTS assay. In such an assay, compounds are screened for their ability to interact with and/or affect several targets (e.g., a collection of “gene signatures”) either in situ or in vitro (preferably in a culture of neural or neuronal cells).

[0029] The invention is described in detail, infra. In particular, Section 5.1 sets forth general definitions and meanings for various terms, both as they are used in the art and in the context of describing the present invention. The MPHTS assays of the invention are then described in general terms, in Section 5.2. Next, preferred techniques that may be used to practice the MPHTS methods are described in Sections 5.3-5.4, including techniques and methods for the preparation of cell and tissue samples, for measuring gene expression profiles, and for bioinformatics and statistical methods to analyze expression profile data.

[0030] The description of the invention in these sections and in the subsequent Examples is illustrative only and in no way limits the scope or meaning of the invention or of any exemplified term. Accordingly, the invention is not limited to any particular preferred embodiments described herein. Indeed, many modifications and variations of the invention will be apparent to those skilled in the art upon reading this specification, and such “equivalents” can be made without departing from the invention in spirit or scope. The invention is therefore limited only by the terms of the appended claims, along with the full scope of equivalents to which the claims are entitled.

### 5.1. DEFINITIONS

[0031] The terms used in this specification generally have their ordinary meanings in the art, within the context of this invention and in the specific context where each term is used. Certain terms are discussed below, or else in the specification, to provide additional guidance to the practitioner in describing the compositions and methods of this invention and how they may be made and used.

[0032] General Definitions. The term “neuropsychiatric disorder”, which may also be referred to as a “major mental illness disorder” or “major mental illness”, refers to a disorder which may be generally characterized by one or more breakdowns in the adaptation process. Such disorders are therefore expressed primarily in abnormalities of thought, feeling and/or behavior producing either distress or impairment of function (i.e., impairment of mental function such as with dementia or senility). Currently, individuals may be evaluated for various neuropsychiatric disorders using criteria set forth in the most recent version of the American Psychiatric Association's Diagnostic and Statistical Manual of Mental Health (DSM-IV). Exemplary neuropsychiatric disorders include, but are not limited to, schizophrenia, attention deficit disorder (ADD), schizoaffective disorder, bipolar affective disorder, unipolar affective disorder, and adolescent conduct disorder.

[0033] As used herein, the term “isolated” means that the referenced material is removed from the environment in which it is normally found. Thus, an isolated biological material can be free of cellular components; i.e., components of the cells in which the material is found or produced. In the case of nucleic acid molecules, an isolated nucleic acid includes a PCR product, an isolated mRNA, a cDNA, or a restriction fragment. In another embodiment, an isolated nucleic acid is preferably excised from the chromosome in which it may be found, and more preferably is no longer joined to non-regulatory, non-coding regions, or to other genes, located upstream or downstream of the gene contained by the isolated nucleic acid molecule when found in the chromosome. In yet another embodiment, the isolated nucleic acid lacks one or more introns. Isolated nucleic acid molecules include sequences inserted into plasmids, cosmids, artificial chromosomes, and the like. Thus, in a specific embodiment, a recombinant nucleic acid is an isolated nucleic acid. An isolated protein may be associated with other proteins or nucleic acids, or both, with which it associates in the cell, or with cellular membranes if it is a membrane-associated protein. An isolated organelle, cell, or tissue is removed from the anatomical site in which it is found in an organism. An isolated material may be, but need not be, purified.

[0034] The term “purified” as used herein refers to material that has been isolated under conditions that reduce or eliminate the presence of unrelated materials, i.e., contaminants, including native materials from which the material is obtained. For example, a purified protein is preferably substantially free of other proteins or nucleic acids with which it is associated in a cell; a purified nucleic acid molecule is preferably substantially free of proteins or other unrelated nucleic acid molecules with which it can be found within a cell. As used herein, the term “substantially free” is used operationally, in the context of analytical testing of the material. Preferably, purified material substantially free of contaminants is at least 50% pure; more preferably, at least 90% pure, and more preferably still at least 99% pure. Purity can be evaluated by chromatography, gel electrophoresis, immunoassay, composition analysis, biological assay, and other methods known in the art.

[0035] Methods for purification are well-known in the art. For example, nucleic acids can be purified by precipitation, chromatography (including preparative solid phase chromatography, oligonucleotide hybridization, and triple helix chromatography), ultracentrifugation, and other means. Polypeptides and proteins can be purified by various methods including, without limitation, preparative disc-gel electrophoresis, isoelectric focusing, HPLC, reversed-phase HPLC, gel filtration, ion exchange and partition chromatography, precipitation and salting-out chromatography, extraction, and countercurrent distribution. For some purposes, it is preferable to produce the polypeptide in a recombinant system in which the protein contains an additional sequence tag that facilitates purification, such as, but not limited to, a polyhistidine sequence, or a sequence that specifically binds to an antibody, such as FLAG and GST. The polypeptide can then be purified from a crude lysate of the host cell by chromatography on an appropriate solid-phase matrix. Alternatively, antibodies produced against the protein or against peptides derived therefrom can be used as purification reagents. Cells can be purified by various techniques, including centrifugation, matrix separation (e.g., nylon wool separation), panning and other immunoselection techniques, depletion (e.g., complement depletion of contaminating cells), and cell sorting (e.g., fluorescence activated cell sorting or “FACS”). Other purification methods are possible. A purified material may contain less than about 50%, preferably less than about 75%, and most preferably less than about 90%, of the cellular components with which it was originally associated. The “substantially pure” indicates the highest degree of purity which can be achieved using conventional purification techniques known in the art.

[0036] A “sample” as used herein refers to a biological material which can be tested, e.g., for the presence of one or more polypeptide or nucleic acids. For example, in one embodiment, a sample is a sample of nucleic acids from a cell (e.g., mRNA, or nucleic acids derived therefrom) and is tested or analyzed for the presence or absence of certain particular nucleic acid sequences, corresponding to certain genes that may be expressed by the cell. Such samples can be obtained from any source, including tissue, blood and blood cells, including circulating hematopoietic stem cells (for possible detection of protein or nucleic acids), plural effusions, cerebrospinal fluid (CSF), ascites fluid, and cell culture.

[0037] Non-human animals include, without limitation, laboratory animals such as mice, rats, rabbits, hamsters, guinea pigs, etc.; domestic animals such as dogs and cats; and, farm animals such as sheep, goats, pigs, horses, and cows. A non-human animal of the present invention may be a mammalian or non-mammalian animal; a vertebrate or an invertebrate.

[0038] In preferred embodiments, the terms “about” and “approximately” shall generally mean an acceptable degree of error for the quantity measured given the nature or precision of the measurements. Typical, exemplary degrees of error are within 20 percent (%), preferably within 10%, and more preferably within 5% of a given value or range of values. Alternatively, and particularly in biological systems, the terms “about” and “approximately” may mean values that are within an order of magnitude, preferably within 5-fold and more preferably within 2-fold of a given value. Numerical quantities given herein are approximate unless stated otherwise, meaning that the term “about” or “approximately” can be inferred when not expressly stated.

[0039] The term “molecule” means any distinct or distinguishable structural unit of matter comprising one or more atoms, and includes, for example, polypeptides and polynucleotides.

[0040] The term “aberrant” or “abnormal”, as applied herein refers to an activity or feature which differs from a normal or activity or feature, or to an activity or feature which is within normal variations of a standard value.

[0041] For example, an abnormal activity of a gene or protein refers to an activity which differs from the activity of the wild-type or native gene or protein, or which differs from the activity of the gene or protein in a healthy subject. An activity of a gene includes, for instance, the transcriptional activity of the gene which may result from, e.g., an aberrant promoter activity. Such an abnormal transcriptional activity can result, e.g., from one or more mutations in a promoter region, such as in a regulatory element thereof. An abnormal transcriptional activity can also result from a mutation in a transcription factor involved in the control of gene expression.

[0042] An activity of a protein can be aberrant because it is stronger than the activity of its native counterpart. Alternatively, an activity can be aberrant because it is weaker or absent related to the activity of its native counterpart. An aberrant activity can also be a change in an activity. For example an aberrant protein can interact with a different protein relative to its native counterpart. A cell can have an aberrant activity due to overexpression or underexpression of a gene or protein. An aberrant activity can result, e.g., from a mutation in the gene, which results, e.g., in lower or higher binding affinity of a ligand or substrate to the protein encoded by the mutated gene.

[0043] The term “therapeutically effective dose” refers to that amount of a compound or compositions that is sufficient to result in a desired activity.

[0044] The phrase “pharmaceutically acceptable” refers to molecular entities and compositions that are physiologically tolerable and do not typically produce an allergic or similar untoward reaction (for example, gastric upset, dizziness and the like) when administered to an individual. Preferably, and particularly where a pharmaceutical composition is used in humans, the term “pharmaceutically acceptable” may mean approved by a regulatory agency (for example, the U.S. Food and Drug Agency) or listed in a generally recognized pharmacopeia for use in animals (for example, the U.S. Pharmacopeia).

[0045] The term “carrier” refers to a diluent, adjuvant, excipient, or vehicle with which a compound is administered. Sterile water or aqueous saline solutions and aqueous dextrose and glycerol solutions are preferably employed as carriers, particularly for injectable solutions. Exemplary suitable pharmaceutical carriers are described in “Reminington's Pharmaceutical Sciences” by E. W. Martin.

[0046] Molecular Biology Definitions. In accordance with the present invention, there may be employed conventional molecular biology, microbiology and recombinant DNA techniques within the skill of the art. Such techniques are explained fully in the literature. See, for example, Sambrook, Fitsch & Maniatis, Molecular Cloning: A Laboratory Manual, Second Edition (1989) Cold Spring Harbor Laboratory Press, Cold Spring Harbor, N.Y. (referred to herein as “Sambrook et al., 1989”); DNA Cloning: A Practical Approach, Volumes I and II (D. N. Glover ed. 1985); Oligonucleotide Synthesis (M. J. Gait ed. 1984); Nucleic Acid Hybridization (B. D. Hames & S. J. Higgins, eds. 1984); Animal Cell Culture (R. I. Freshney, ed. 1986); Immobilized Cells and Enzymes (IRL Press, 1986); B. E. Perbal, A Practical Guide to Molecular Cloning (1984); F. M. Ausubel et al. (eds.), Current Protocols in Molecular Biology, John Wiley & Sons, Inc. (1994).

[0047] The term “polymer” means any substance or compound that is composed of two or more building blocks (‘mers’) that are repetitively linked together. For example, a “dimer” is a compound in which two building blocks have been joined together; a “trimer” is a compound in which three building blocks have been joined together; etc.

[0048] The term “polynucleotide” or “nucleic acid molecule” as used herein refers to a polymeric molecule having a backbone that supports bases capable of hydrogen bonding to typical polynucleotides, wherein the polymer backbone presents the bases in a manner to permit such hydrogen bonding in a specific fashion between the polymeric molecule and a typical polynucleotide (e.g., single-stranded DNA). Such bases are typically inosine, adenosine, guanosine, cytosine, uracil and thymidine. Polymeric molecules include “double stranded” and “single stranded” DNA and RNA, as well as backbone modifications thereof (for example, methylphosphonate linkages).

[0049] Thus, a “polynucleotide” or “nucleic acid” sequence is a series of nucleotide bases (also called “nucleotides”), generally in DNA and RNA, and means any chain of two or more nucleotides. A nucleotide sequence frequently carries genetic information, including the information used by cellular machinery to make proteins and enzymes. The terms include genomic DNA, cDNA, RNA, any synthetic and genetically manipulated polynucleotide, and both sense and antisense polynucleotides. This includes single- and double-stranded molecules; i.e., DNA-DNA, DNA-RNA, and RNA-RNA hybrids as well as “protein nucleic acids” (PNA) formed by conjugating bases to an amino acid backbone. This also includes nucleic acids containing modified bases, for example, thio-uracil, thio-guanine and fluoro-uracil.

[0050] The polynucleotides herein may be flanked by natural regulatory sequences, or may be associated with heterologous sequences, including promoters, enhancers, response elements, signal sequences, polyadenylation sequences, introns, 5′-and 3′-non-coding regions and the like. The nucleic acids may also be modified by many means known in the art. Non-limiting examples of such modifications include methylation, “caps”, substitution of one or more of the naturally occurring nucleotides with an analog, and internucleotide modifications such as, for example, those with uncharged linkages (e.g., methyl phosphonates, phosphotriesters, phosphoroamidates, carbamates, etc.) and with charged linkages (e.g., phosphorothioates, phosphorodithioates, etc.). Polynucleotides may contain one or more additional covalently linked moieties, such as proteins (e.g., nucleases, toxins, antibodies, signal peptides, poly-L-lysine, etc.), intercalators (e.g., acridine, psoralen, etc.), chelators (e.g., metals, radioactive metals, iron, oxidative metals, etc.) and alkylators to name a few. The polynucleotides may be derivatized by formation of a methyl or ethyl phosphotriester or an alkyl phosphoramidite linkage. Furthermore, the polynucleotides herein may also be modified with a label capable of providing a detectable signal, either directly or indirectly. Exemplary labels include radioisotopes, fluorescent molecules, biotin and the like. Other non-limiting examples of modification which may be made are provided, below, in the description of the present invention.

[0051] Specific non-limiting examples of synthetic nucleic acids envisioned for this invention include, in addition to the nucleic acid moieties described above, nucleic acids that contain phosphorothioates, phosphotriesters, methyl phosphonates, short chain alkyl, or cycloalkyl intersugar linkages or short chain heteroatomic or heterocyclic intersugar linkages. Most preferred are those with CH₂—NH—O—CH_{2,} CH₂—N(CH₃)—O—CH_{2,} CH₂—O—N(CH₃)—CH_{2,} CH₂—N(CH₃)—N(CH₃)—CH₂ and O—N(CH₃)—CH₂—CH₂ backbones (where phosphodiester is O—PO₂—O—CH₂). U.S. Pat. No. 5,677,437 describes heteroaromatic nucleic acid linkages. Nitrogen linkers or groups containing nitrogen can also be used to prepare nucleic acid mimics (U.S. Pat. Nos. 5,792,844 and 5,783,682). U.S. Pat. No. 5,637,684 describes phosphoramidate and phosphorothioamidate oligomeric compounds. Also envisioned are nucleic acids having morpholino backbone structures (U.S. Pat. No. 5,034,506). In other embodiments, such as the peptide-nucleic acid (PNA) backbone, the phosphodiester backbone of the nucleic acid may be replaced with a polyamide backbone, the bases being bound directly or indirectly to the aza nitrogen atoms of the polyamide backbone (Nielsen et al., Science 254:1497, 1991). Other synthetic nucleic acids may contain substituted sugar moieties comprising one of the following at the 2′ position: OH, SH, SCH_{3,} F, OCN, O(CH₂)ₙNH2 or O(CH₂)ₙCH₃ where n is from 1 to about 10; C₁ to C₁₀ lower alkyl, substituted lower alkyl, alkaryl or aralkyl; Cl; Br; CN; CF₃; OCF₃; O—; S—, or N—alkyl; O—, S—, or N—alkenyl; SOCH₃; SO₂CH₃; ONO₂;NO₂; N₃; NH₂; heterocycloalkyl; heterocycloalkaryl; aminoalkylamino; polyalkylamino; substituted silyl; a fluorescein moiety; an RNA cleaving group; a reporter group; an intercalator; a group for improving the pharmacokinetic properties of a nucleic acid; or a group for improving the pharmacodynamic properties of an nucleic acid, and other substituents having similar properties. Nucleic acids may also have sugar mimetics such as cyclobutyls or other carbocyclics in place of the pentofuranosyl group. Nucleotide units having nucleosides other than adenosine, cytidine, guanosine, thymidine and uridine, such as inosine, may be used in an oligonucleotide molecule.

[0052] The term “oligonucleotide” refers to a nucleic acid, generally of at least 10, preferably at least 15, and more preferably at least 20 nucleotides, preferably no more than 100 nucleotides, that is hybridizable to a genomic DNA molecule, a cDNA molecule, or an mRNA molecule encoding a gene, mRNA, cDNA, or other nucleic acid of interest. Oligonucleotides can be labeled, e.g., with ³²P-nucleotides or nucleotides to which a label, such as biotin or a fluorescent dye (for example, Cy3 or Cy5) has been covalently conjugated. In one embodiment, a labeled oligonucleotide can be used as a probe to detect the presence of a nucleic acid. In another embodiment, oligonucleotides (one or both of which may be labeled) can be used as PCR primers, either for cloning full length or a fragment of a gene, or to detect the presence of nucleic acids encoding a particular gene product (e.g., to detect the presence of a particular mRNA). In a further embodiment, an oligonucleotide of the invention can form a triple helix. Generally, oligonucleotides are prepared synthetically, preferably on a nucleic acid synthesizer. Accordingly, oligonucleotides can be prepared with non-naturally occurring phosphoester analog bonds, such as thioester bonds, etc.

[0053] A “polypeptide” is a chain of chemical building blocks called amino acids that are linked together by chemical bonds called “peptide bonds”. The term “protein” refers to polypeptides that contain the amino acid residues encoded by a gene or by a nucleic acid molecule (e.g., an mRNA or a cDNA) transcribed from that gene either directly or indirectly. Optionally, a protein may lack certain amino acid residues that are encoded by a gene or by an mRNA. For example, a gene or mRNA molecule may encode a sequence of amino acid residues on the N-terminus of a protein (i.e., a signal sequence) that is cleaved from, and therefore may not be part of, the final protein. A protein or polypeptide, including an enzyme, may be a “native” or “wild-type”, meaning that it occurs in nature; or it may be a “mutant”, “variant” or “modified”, meaning that it has been made, altered, derived, or is in some way different or changed from a native protein or from another mutant.

[0054] A “ligand” is, broadly speaking, any molecule that binds to another molecule. In preferred embodiments, the ligand is either a soluble molecule or the smaller of the two molecule or both. The other molecule is referred to as a “receptor”. In preferred embodiments, both a ligand and its receptor are molecules (preferably proteins or polypeptides) produced by cells. Preferably, a ligand is a soluble molecule and the receptor is an integral membrane protein (i.e., a protein expressed on the surface of a cell). The binding of a ligand to its receptor is frequently a step of signal transduction within a cell. Exemplary ligand-receptor interactions include, but are not limited to, binding of a hormone to a hormone receptor (for example, the binding of estrogen to the estrogen receptor) and the binding of a neurotransmitter to a receptor on the surface of a neuron. “Amplification” of a polynucleotide, as used herein, denotes the use of polymerase chain reaction (PCR) to increase the concentration of a particular DNA sequence within a mixture of DNA sequences. For a description of PCR see Saiki et al., Science 1988, 239:487. “Chemical sequencing” of DNA denotes methods such as that of Maxam and Gilbert (Maxam-Gilbert sequencing; see Maxam & Gilbert, Proc. Natl. Acad. Sci. U.S.A. 1977, 74:560), in which DNA is cleaved using individual base-specific reactions. “Enzymatic sequencing” of DNA denotes methods such as that of Sanger (Sanger et al., Proc. Natl. Acad. Sci. U.S.A. 1977, 74:5463) and variations thereof well known in the art, in a single-stranded DNA is copied and randomly terminated using DNA polymerase.

[0055] A “gene” is a sequence of nucleotides which code for a functional “gene product”. Generally, a gene product is a functional protein. However, a gene product can also be another type of molecule in a cell, such as an RNA (e.g., a tRNA or a rRNA). For the purposes of the present invention, a gene product also refers to an mRNA sequence which may be found in a cell. For example, measuring gene expression levels according to the invention may correspond to measuring mRNA levels. A gene may also comprise regulatory (i.e., non-coding) sequences as well as coding sequences. Exemplary regulatory sequences include promoter sequences, which determine, for example, the conditions under which the gene is expressed. The transcribed region of the gene may also include untranslated regions including introns, a 5′-untranslated region (5′-UTR) and a 3′-untranslated region (3′-UTR).

[0056] A “coding sequence” or a sequence “encoding” an expression product, such as a RNA, polypeptide, protein or enzyme, is a nucleotide sequence that, when expressed, results in the production of that RNA, polypeptide, protein or enzyme; i.e., the nucleotide sequence “encodes” that RNA or it encodes the amino acid sequence for that polypeptide, protein or enzyme.

[0057] A “promoter sequence” is a DNA regulatory region capable of binding RNA polymerase in a cell and initiating transcription of a downstream (3′ direction) coding sequence. For purposes of defining the present invention, the promoter sequence is bounded at its 3′ terminus by the transcription initiation site and extends upstream (5′ direction) to include the minimum number of bases or elements necessary to initiate transcription at levels detectable above background. Within the promoter sequence will be found a transcription initiation site (conveniently found, for example, by mapping with nuclease S1), as well as protein binding domains (consensus sequences) responsible for the binding of RNA polymerase.

[0058] A coding sequence is “under the control of” or is “operatively associated with” transcriptional and translational control sequences in a cell when RNA polymerase transcribes the coding sequence into RNA, which is then trans-RNA spliced (if it contains introns) and, if the sequence encodes a protein, is translated into that protein.

[0059] The term “express” and “expression” means allowing or causing the information in a gene or DNA sequence to become manifest, for example producing RNA (such as rRNA or mRNA) or a protein by activating the cellular functions involved in transcription and translation of a corresponding gene or DNA sequence. A DNA sequence is expressed by a cell to form an “expression product” such as an RNA (e.g., a mRNA or a rRNA) or a protein. The expression product itself, e.g., the resulting RNA or protein, may also said to be “expressed” by the cell.

[0060] The term “heterologous” refers to a combination of elements not naturally occurring. For example, the present invention includes chimeric RNA molecules that comprise an rRNA sequence and a heterologous RNA sequence which is not part of the rRNA sequence. In this context, the heterologous RNA sequence refers to an RNA sequence that is not naturally located within the ribosomal RNA sequence. Alternatively, the heterologous RNA sequence may be naturally located within the ribosomal RNA sequence, but is found at a location in the rRNA sequence where it does not naturally occur. As another example, heterologous DNA refers to DNA that is not naturally located in the cell, or in a chromosomal site of the cell. Preferably, heterologous DNA includes a gene foreign to the cell. A heterologous expression regulatory element is a regulatory element operatively associated with a different gene that the one it is operatively associated with in nature.

[0061] The terms “mutant” and “mutation” mean any detectable change in genetic material, e.g., DNA, or any process, mechanism or result of such a change. This includes gene mutations, in which the structure (e.g., DNA sequence) of a gene is altered, any gene or DNA arising from any mutation process, and any expression product (e.g., RNA, protein or enzyme) expressed by a modified gene or DNA sequence. The term “variant” may also be used to indicate a modified or altered gene, DNA sequence, RNA, enzyme, cell, etc.; i.e., any kind of mutant. For example, the present invention relates to altered or “chimeric” RNA molecules that comprise an rRNA sequence that is altered by inserting a heterologous RNA sequence that is not naturally part of that sequence or is not naturally located at the position of that rRNA sequence. Such chimeric RNA sequences, as well as DNA and genes that encode them, are also referred to herein as “mutant” sequences. “Sequence-conservative variants” of a polynucleotide sequence are those in which a change of one or more nucleotides in a given codon position results in no alteration in the amino acid encoded at that position.

[0062] “Function-conservative variants” of a polypeptide or polynucleotide are those in which a given amino acid residue in the polypeptide, or the amino acid residue encoded by a codon of the polynucleotide, has been changed or altered without altering the overall conformation and function of the polypeptide. For example, function-conservative variants may include, but are not limited to, replacement of an amino acid with one having similar properties (for example, polarity, hydrogen bonding potential, acidic, basic, hydrophobic, aromatic and the like). Amino acid residues with similar properties are well known in the art. For example, the amino acid residues arginine, histidine and lysine are hydrophilic, basic amino acid residues and may therefore be interchangeable. Similar, the amino acid residue isoleucine, which is a hydrophobic amino acid residue, may be replaced with leucine, methionine or valine. Such changes are expected to have little or no effect on the apparent molecular weight or isoelectric point of the polypeptide. Amino acid residues other than those indicated as conserved may also differ in a protein or enzyme so that the percent protein or amino acid sequence similarity (e.g., percent identity or homology) between any two proteins of similar function may vary and may be, for example, from 70% to 99% as determined according to an alignment scheme such as the Cluster Method, wherein similarity is based on the MEGALIGN algorithm. “Function-conservative variants” of a given polypeptide also include polypeptides that have at least 60% amino acid sequence identity to the given polypeptide as determined, e.g., by the BLAST or FASTA algorithms. Preferably, function-conservative variants of a given polypeptide have at least 75%, more preferably at least 85% and still more preferably at least 90% amino acid sequence identity to the given polypeptide and, preferably, also have the same or substantially similar properties (e.g., of molecular weight and/or isoelectric point) or functions (e.g., biological functions or activities) as the native or parent polypeptide to which it is compared.

[0063] The term “homologous”, in all its grammatical forms and spelling variations, refers to the relationship between two proteins that possess a “common evolutionary origin”, including proteins from superfamilies (e.g., the immunoglobulin superfamily) in the same species of organism, as well as homologous proteins from different species of organism (for example, myosin light chain polypeptide, etc.; see, Reeck et al., Cell 1987, 50:667). Such proteins (and their encoding nucleic acids) have sequence homology, as reflected by their sequence similarity, whether in terms of percent identity or by the presence of specific residues or motifs and conserved positions.

[0064] The term “sequence similarity”, in all its grammatical forms, refers to the degree of identity or correspondence between nucleic acid or amino acid sequences that may or may not share a common evolutionary origin (see, Reeck et al., supra). However, in common usage and in the instant application, the term “homologous”, when modified with an adverb such as “highly”, may refer to sequence similarity and may or may not relate to a common evolutionary origin.

[0065] In specific embodiments, two nucleic acid sequences are “substantially homologous” or “substantially similar” when at least about 80%, and more preferably at least about 90% or at least about 95% of the nucleotides match over a defined length of the nucleic acid sequences, as determined by a sequence comparison algorithm known such as BLAST, FASTA, DNA Strider, CLUSTAL, etc. An example of such a sequence is an allelic or species variant of the specific genes of the present invention. Sequences that are substantially homologous may also be identified by hybridization, e.g., in a Southern hybridization experiment under, e.g., stringent conditions as defined for that particular system.

[0066] Similarly, in particular embodiments of the invention, two amino acid sequences are “substantially homologous” or “substantially similar” when greater than 80% of the amino acid residues are identical, or when greater than about 90% of the amino acid residues are similar (i.e., are functionally identical). Preferably the similar or homologous polypeptide sequences are identified by alignment using, for example, the GCG (Genetics Computer Group, Program Manual for the GCG Package, Version 7, Madison Wis.) pileup program, or using any of the programs and algorithms described above (e.g., BLAST, FASTA, CLUSTAL, etc.).

[0067] The terms “array” and “microarray” are used interchangeably and refer generally to any ordered arrangement (e.g., on a surface or substrate) or different molecules, referred to herein as “probes”. Each different probe of an arrays specifically recognizes and/or binds to a particular molecule, which is referred to herein as its “target”. Microarrays are therefore useful for simultaneously detecting the presence or absence of a plurality of different target molecules, e.g., in a sample. In preferred embodiments, arrays used in the present invention are “addressable arrays” where each different probe is associated with a particular “address”. For example, in preferred embodiments where the probes are immobilized on a surface or a substrate, each different probe of the addressable array may be immobilized at a particular, known location on the surface or substrate. The presence or absence of that probe's target molecule in a sample may therefore be readily determined by simply determining whether a target has bound to that particular location on the surface or substrate.

[0068] In various embodiments, an array of the invention may comprise a plurality of different antibodies that each bind to a particular target protein or antigen. More preferably, however, the methods of the invention are practiced using nucleic acid arrays (also referred to herein as “transcript arrays” or “hybridization arrays”) that comprise a plurality of nucleic acid probes immobilized on a surface or substrate. The different nucleic acid probes are complementary to, and therefore hybridize, to different target nucleic acid molecules, e.g., in a sample. Thus such probes may be used to simultaneously detect the presence and/or abundance of a plurality of different nucleic acid molecules in a sample, including the expression of a plurality of different genes; e.g., the presence and/or abundance of different mRNA molecules, or of nucleic acid molecules derived therefrom (for example, cDNA or cRNA).

[0069] A nucleic acid molecule is “hybridizable” to another nucleic acid molecule, such as a cDNA, genomic DNA, or RNA, when a single stranded form of the nucleic acid molecule can anneal to the other nucleic acid molecule under the appropriate conditions of temperature and solution ionic strength (see Sambrook et al., supra). The conditions of temperature and ionic strength determine the “stringency” of the hybridization. For preliminary screening for homologous nucleic acids, low stringency hybridization conditions (e.g., 5× SSC, 0. 1% SDS, and no formamide; or 30% formamide, 5× SSC, 0.5% SDS) may be used. Alternatively, hybridizations may also be performed under conditions that are relatively more stringent, such as moderately stringent hybridization conditions (e.g., 40% formamide, with 5× or 6× SCC) or high stringency hybridization conditions (e.g., 50% formamide, 5× or 6× SCC). SCC is a buffer solution commonly used for nucleic acid hybridizations and comprises 0.15 M NaCl, 0.015 M Na-citrate.

[0070] Hybridization requires that the two nucleic acids contain complementary sequences, although depending on the stringency of the hybridization, mismatches between bases are possible. The appropriate stringency for hybridizing nucleic acids depends on the length of the nucleic acids and the degree of complementation, variables well known in the art. The greater the degree of similarity or homology between two nucleotide sequences, the greater the value of Tₘ for hybrids of nucleic acids having those sequences. The relative stability (corresponding to higher Tₘ) of nucleic acid hybridizations decreases in the following order: RNA:RNA, DNA:RNA, DNA:DNA. For hybrids of greater than 100 nucleotides in length, equations for calculating Tₘ have been derived (see Sambrook et al., supra, 9.50-9.51). For hybridization with shorter nucleic acids, i.e., oligonucleotides, the position of mismatches becomes more important, and the length of the oligonucleotide determines its specificity (see Sambrook et al., supra, 11.7-11.8). A minimum length for a hybridizable nucleic acid is at least about 10 nucleotides; preferably at least about 15 nucleotides; and more preferably the length is at least about 20 nucleotides.

[0071] Suitable hybridization conditions for oligonucleotides (e.g., for oligonucleotide probes or primers) are typically somewhat different than for full-length nucleic acids (e.g., full-length cDNA), because of the oligonucleotides' lower melting temperature. Because the melting temperature of oligonucleotides will depend on the length of the oligonucleotide sequences involved, suitable hybridization temperatures will vary depending upon the oligonucleotide molecules used. Exemplary temperatures may be 37° C. (for 14-base oligonucleotides), 48° C. (for 17-base oligonucleotides), 55° C. (for 20-base oligonucleotides) and 60° C. (for 23-base oligonucleotides). Exemplary suitable hybridization conditions for oligonucleotides include washing in 6× SSC/0.05% sodium pyrophosphate, or other conditions that afford equivalent levels of hybridization.

[0072] Preferably, nucleic acid molecules in the present invention are detected by hybridization to probes of a microarray. Hybridization and wash conditions are therefore preferably chosen so that the probe “specifically binds” or “specifically hybridizes” to a specific target nucleic acid. In other words, the nucleic acid probe preferably hybridizes, duplexes or binds to a target nucleic acid molecules having a complementary nucleotide sequence, but does not hybridize to a nucleic acid molecules having a non-complementary sequence. As used herein, one polynucleotide sequence is considered complementary to another when, if the shorter of the polynucleotides is less than or equal to about 25 bases, there are no mismatches using standard base-pairing rules. If the shorter of the two polynucleotides is longer than about 25 bases, there is preferably no more than a 5% mismatch. Preferably, the two polynucleotides are perfectly complementary (i.e., no mismatches). In can be easily demonstrated that particular hybridization conditions are suitable for specific hybridization by carrying out the assay using negative controls. See, for example, Shalon et al., Genome Research 1996, 639-645; and Chee et al., Science 1996, 274:610-614.

[0073] Optimal hybridization conditions for use with microarrays will depend on the length (e.g., oligonucleotide versus polynucleotide greater than about 200 bases) and type (e.g., RNA, DNA, PNA, etc.) of probe and target nucleic acid. General parameters for specific (i.e., stringent) hybridization conditions are described above. For cDNA microarrays, such as those described by Schena et al. (Proc. Natl. Acad. Sci. USA 1996, 93:10614), typical hybridization conditions comprise hybridizing in 5× SSC and 0.2% SDS at 65° C. for about four hours, followed by washes at 25° C. in a low stringency wash buffer (for example, 1× SSC and 0.2% SDS), and about 10 minutes washing at 25° C. in a high stringency wash buffer (for example, 0.1× SSC and 0.2% SDS). Useful hybridization conditions are also provided, e.g., in Tijessen, Hybridization with Nucleic Acid Probes, Elsevier Sciences Publishers (1996), and Kricka, Nonisotopic DNA Probe Techniques, Academic Press, San Diego Calif. (1992).

[0074] The term “expression profile” or “gene signature” refer, generally, to any description or measurement of the genes and/or nucleic acids that are expressed by a cell or organism under particular conditions. For example, an expression profile may be measured under particular conditions of growth, for example at a particular temperature, in the presence or absence of particular growth media, and/or in the presence or absence of particular nutrients. In preferred embodiments, gene signatures may be obtained, e.g., for cells or tissues that are derived from an individual or individuals having a neuropsychiatric disorder. Gene signatures may also be obtained for a cell or organism exposed to one or more particular drugs or other compounds, such as for a cell or organism exposed to a known therapeutic compound (e.g., with a known use for treating a neuropsychiatric disorder) or for a cell or organism exposed to a “test” or “candidate” compound (e.g., as part of a MPHTS assay). An expression profile or gene signature may comprise a description of particular genes that are expressed by a cell or organism, a description of the level or abundance with which genes are expressed in a cell or organism, or both. Accordingly, the term “signature gene” is used herein to refer to a gene that may be used, either alone or with other genes (e.g., as part of a gene signature) to characterize a particular condition such as the presence or absence of a neuropsychiatric disorder.

[0075] Preferably, an expression profile will comprise a list of different mRNA species that are expressed by a cell and their relative abundances. For example, mRNA abundances can be measured using a microarray, as described in Section 5.2, infra. In more preferably embodiments, nucleic acids (e.g., mRNA) expressed by a cell are reversed transcribed into either cDNA or cRNA, and the abundances of the cDNA and/or cRNA molecules are measured.

### 5.2. Multi-Parameter High Throughput Screening (MPHTS)

[0076] In more detail, the methods and compositions of the invention comprise the following five elements. The skilled artisan will appreciate, however, that the invention may be practiced omitting one or more of these elements and without executing the recited elements in any particular order. For example, in certain embodiments, some of the below-described elements may be obtained from another source, such as from an online database. The invention may therefore be practiced without necessarily performing each of these elements, e.g., as a separate step in a screening method.

[0077] First, gene-signatures are obtained or provided by measuring expression levels for a plurality of genes in cells or tissues derived from an individual having a neuropsychiatric disorder. In preferred embodiments, the cells and/or tissues are brain cells or tissues derived from human psychiatric patients (for example, in post mortem tissue samples). However, brain and other neuronal cells or tissues from other species of organisms may also be used, such as from a mouse, a rat, a primate or another species of mammal. Preferably, the organism from which the brain cells or tissue are derived represents an acceptable animal model for a neuropsychiatric disorder. Preferably, the expression levels measured in the cells or tissues are compared to expression levels from normal cells or tissues (i.e., brain cells or tissues from healthy individuals, not affected by a neuropsychiatric disorder) to identify particular genes that are differentially expressed in cells from an individual having a neuropsychiatric disorder compared to one who does not have a neuropsychiatric disorder.

[0078] Second, gene-signatures may also be obtained or provided by measuring expression levels for a plurality of genes in cultured neuronal cells or tissues (e.g., in cultured neurons that are derived from neural stem cells or from other neuronal cell lines). Human neurons and/or neuronal cell lines are particularly preferred. However, the cells may be obtained or derived from any species of organism, particularly a mammalian species such as a mouse, a rat or a primate. Similarly, the cultured neuronal tissues may also be obtained from any species of mammal, such as from a rat, a mouse, a primate or a human.

[0079] For example, and not by way of limitation, a mouse neuroblastoma cell line may be used in such methods. Such cells are readily available, e.g., from the American Type Culture Collection (“ATCC”, Manasas Va.). See, for example, ATCC Accession No. CRL-2263. As another non-limiting example, U.S. provisional patent application serial No. 60/299,066 filed on Jun. 18, 2001 describes the use of rat neuronal cell cultures to evaluate neuropsychiatric drugs. Such cells may also be used in the MPHTS methods of this invention.

[0080] Third, drug signatures may also be obtained or provided by measuring expression levels for a plurality of genes in cultured neuronal cells or tissues that are treated with a therapeutic compound. The cultured cells may be any type of neuronal cell or cell lines described supra for obtaining gene-signatures from a cell line. Similarly, any of the types of tissue cultures described, supra, may also be used to obtain drug signatures. Preferably, the drug signatures are signatures for compounds that are known to be effective for treating a neuropsychiatric disorder. Exemplary compounds may include valproate, buspirone, lithium, carbamazepine, clozapine, olanzapine, haloperidol, secretin and vasoactive intestinal polypeptide (VIP), to name a few. Exemplary drug signatures, which were obtained from broth rat and human neuronal cells treated with therapeutic compounds, are provided in the Examples, infra. Other drug signatures may be readily obtained by those skilled in the art.

[0081] Fourth, expression levels for the plurality of genes are obtained or provided in neuronal cells that are contacted with a test compound (referred to here as a “drug candidate”), and these expression levels may then be compared to expression levels from gene signatures obtained for the neuropsychiatric disorder (as described in the first element, supra) and/or to drug-signatures obtained the known therapeutic compound (as described in the third element, supra). In preferred embodiments, expression levels or “signatures” obtained from a test compound are also compared to expression levels when the cell or cell line is not contacted with the test compound or any other drug (described in the second element, supra). Generally speaking, the “signature” or expression levels obtained when the neuronal cells are contacted with a test compound are compared to the gene signatures of the cells when they are not contacted with any test or therapeutic compound (i.e., the gene signature obtained as element two, described supra) to identify changes in the expression level(s) for particular genes. Similarly, the drug-signature (obtained as described, supra, for element three) is also compared to the neuronal cell lines gene signature, to identify particular genes whose expression levels change when the cells are contacted with the therapeutic compound. In instances where changes in expression levels when the cells are contacted with the test compound are identical (or at least similar) to changes in expression levels when the cell are contacted with the known therapeutic compound, then the test compound is identified as a candidate compound for treating the neuropsychiatric disorder. Thus, using these screening methods a skilled artisan is able to rapidly and inexpensively identify compounds that are most promising as novel neuropsychiatric drugs, while eliminating compounds that show little promise and/or are unlikely candidates for treating a neuropsychiatric disorder.

[0082] In preferred embodiments of the invention, changes in expression levels when the cells are contacted with the test compound may also be compared to gene signatures obtained for the particular neuropsychiatric disorder of interest (i.e., to the gene signatures obtained as described, supra, for the first element). Preferably, a test compound that is identified as a candidate therapeutic compound will alter the expression of “signature gene” in a way that is opposite or contrary to the expression observed in the disorder's gene signature. For example, where a particular gene is expressed at abnormally high levels in cells or tissues from individuals affected by the particular neuropsychiatric disorder (compared to expression levels in cells or tissues from individuals not affected by the disorder), a candidate compound identified in these screening methods will preferably inhibit that gene's expression (i.e., the gene is preferably expressed at lower levels when the cells are contacted with the test compound, compared to its expression when the cell is not contacted with the test compound).

[0083] As an example, and not by way of limitation, Example 1, infra, describes exemplary screening assays in which expression levels of a plurality of genes were measured in neuronal cells contacted with valproate, a known therapeutic compound for treating neuropsychiatric disorders such as bipolar affective disorder. Signature genes are thereby identified, and expression levels for these genes are then obtained or provided in cells contacted with a test compound. These expression levels are then compared to expression levels provided in the art (see, Hakak et al., Proc. Natl. Acad. Sci. USA 2001, 98:4746-4751) for homologous genes from the brains of schizophrenic individuals.

[0084] Fifth, as an optional element for the invention, drug candidates or candidate compounds that are identified as described, supra, may be further optimized, e.g., to account for individual genetic variability.

[0085] As indicated above, the MPHTS assays of the invention are useful as an inexpensive and rapid initial screening to quickly identify compounds that are most promising as neuropsychiatric drugs, while quickly eliminating compounds that show little promise and/or are unlikely candidates for treating a neuropsychiatric disorder. In preferred embodiments, the MPHTS assays are used to identify candidate compounds for treating bipolar affective disorder (BAD), depression, schizophrenia and autism. However, the assays are by no means limited to these particular disorders, and may be readily adapted to identify candidate compounds for treating any neuropsychiatric disorder. Other exemplary, preferred neuropsychiatric disorders for which these assays may be used include anxiety disorders, eating disorders, addictive disorders and Attention Deficit Hyperactivity Disorder (ADHD).

[0086] Classes of compounds that may be identified by such screening assays include, but are not limited to, small molecules (e.g., organic or inorganic molecules which are less than about 2 kd in molecular weight, are more preferably less than about 1 kd in molecular weight, and/or are able to cross the blood-brain barrier or gain entry into an appropriate cell, as well as macromolecules (e.g., molecules greater than about 2 kd in molecular weight). In preferred embodiments, commercially available compound libraries may be purchased and screened in an MPHTS assay of the invention. Examples of preferred libraries include TOCRIS (Tocris Cookson, Ltd. Avonmouth Bristol, United Kingdom), SIGMA RBI (Sigma Alldrich Inc., St. Louis Mo.), ChemBridge (ChemBridge Corp., San Diego Calif.), Chemdiv (ChemDiv Inc., San Diego Calif.) and Prestwick (Prestwick Chemical, Inc., Washington D.C.), to name a few.

[0087] The selection of appropriate small molecule compound concentrations for the treatment of cells in vitro or for dosing of animals in vivo is preferred to discriminate between physiological and toxicological effects of a given compound. As an initial means for determining the deleterious effects of a compound or set of compounds, cells may be seeded (e.g., in multiple-well plates) and treated with a range of compound concentrations. The compounds' effect (e.g., its cytotoxic or apoptotoic effect) may then be gauged, e.g., using commercially available kits and routine methods well known in the art.

[0088] Compounds identified by these screening assays may also include peptides and polypeptides. For example, soluble peptides, fusion peptides members of combinatorial libraries (such as ones described by Lam et al., Nature 1991, 354:82-84; and by Houghten et al., Nature 1991, 354:84-86); members of libraries derived by combinatorial chemistry, such as molecular libraries of D- and/or L-configuration amino acids; phosphopeptides, such as members of random or partially degenerate, directed phosphopeptide libraries (see, e.g., Songyang et al., Cell 1993, 72:767-778); antibodies, including but not limited to polyclonal, monoclonal, humanized, anti-idiotypic, chimeric, or single chain antibodies; antibody fragments, including but not limited to FAb, F(ab′)₂, FAb expression library fragments and epitope-binding fragments thereof.

[0089] The compounds used in such screening assays are also preferably essential pure and free of contaminants which may, themselves, alter or influence gene expression. Compound purity may be assessed by any number of means that are routine in the art, such as LC-MS and NMR spectroscopy. Libraries of test compounds are also preferably biased by using computational selection methods which are routine in the art. Tools for such computational selection, such as Pipeline PilotJ (Scitegic Inc., San Diego, Calif.) are commercially available. The compounds may be assessed using rules such as the “Lipinski criteria” (see, Lipinski et al., Adv. Drug Deliv. Rev. 2001, 46:3-26) and/or any other criteria or metrics commonly used in the art.

### 5.3. Preparation of Neuronal Cell and Tissue Samples

[0090] Brain Tissue Samples. In certain limited embodiments, brain cells and tissues for use in the MPHTS methods of this invention may be obtained from individuals (e.g., from patients) in a biopsy. However, those skilled in the art will recognize that brain surgeries permitting a biopsy are relatively rare and primarily involve surgical excisions (e.g., for the treatment of epilepsy) rather than brain regions relevant to neuropsychiatric disorder such as schizophrenia or bipolar affective disorder. In certain embodiments, however, useful disease profiles may be obtained from cultured peripheral nervous system neurons, such as rhinoneuroepithelial cells. Such cells may be readily obtained from a nasal biopsy, and disease profiles from such cells may be used to identify changes in gene expression that are associated with neuropsychiatric disorders such as schizophrenia.

[0091] In preferred embodiments, brain cells or tissues used in the methods of this invention are instead obtained post-mortem, e.g., from cadavers of individuals who had or exhibited symptoms of a neuropsychiatric disorder during their lifetime.

[0092] Those skilled in the art will readily appreciate that a large number of carefully collected brain tissue samples should preferably be obtained to assure statistical reliability (see, for example, Torrey et al., Schizophr Res. 2000, 44:151; Bahn et al., J. Chem. Neuroanatomy 2001, 22:79-94; and Vawter et al., Brain Res. Bull. 2001, 55:641-650). This is particularly desirable where there is considerable heterogeneity in patient age to permit accounting for age-associated variables (for example, progressive brain degeneration, which may also occur in schizophrenia). However, smaller samples may be used, e.g., for preliminary screening assays where statistical reliability may not be as essential. It is also preferable that the samples be matched, e.g., according to the patients' age, sex, cause of death and post-mortem interval. The brain samples used preferably are not acquired from cadavers under circumstances that might themselves affect the quality of the cells or tissues acquired. For example, samples obtained following a prolonged moribund state, a coma, hpoxia, pyrexia or stroke preferably are not used in MPHTS methods of the invention. A skilled artisan may readily recognize such compromised, ante mortem states, e.g., from the extent of brain acidosis. Generally, measured postmortem tissue pH values that are below about 6.4 indicate that the tissue has been subjected to such a compromised ante mortem state and should not be used. In addition, the postmortem tissue pH value is also critical to the integrity of mRNA obtained from the tissue.

[0093] It is understood that a reliable psychiatric diagnosis and cause of death should also be obtained or determined for the individual. It is, moreover, additionally preferably to identify factors such as concomitant medical conditions, medications taken during the patient's lifetime (particularly immediately prior to death), surgical treatments (including cancer treatments) and substance abuse for each patient. The hemisphere and region of the brain from which each sample is taken is also preferably noted and recorded.

[0094] Generally, samples that have been subject to such conditions as may affect the reliability of gene expression measurements should not be used. However, in many situations the skilled artisan will recognize that such factors may be sufficiently controlled for and the sample, therefore, acceptable for use in MPHTS. In such cases, however, it is preferable and often essential that the samples be appropriately matched. As an example, and not by way of limitation, it is recognized that smoking alters the expression of many genes in the hippocampus, a region of the brain that is also associated with schizophrenia (Wang et al., Abs. Soc. Neurosci. 2001, 27). However, the overlap between genes whose expression levels have been reported as altered by those two conditions is believed to be minimal (see, Wang et al., supra). Therefore, it may be possible to practice MPHTS methods of the invention using samples from smoking or non-smoking individuals, provided the samples are appropriately matched.

[0095] Those skilled in the art will also appreciate that the levels and quality of RNA extracted from post-mortem samples may be influenced by factors such as the post mortem interval (i.e., the time interval between death and RNA extraction), the refrigeration time (i.e., the time interval from death to patient storage in a cold environment), the storage time (i.e., the duration of time during which the cadaver is refrigerated). Accordingly, it is preferably that such factors be appropriately controlled and that the steps of RNA extraction from these tissue samples be as efficient as possible. In particularly preferred embodiments, the brain or tissue samples are unfixed (i.e., are not treated with protein cross-linkers such as formalin) and have not been thawed more than once.

[0096] In a preferred embodiment, samples of brain tissue may be obtained, e.g., post-mortem from cadavers of individuals who (during their lifetime) suffered from or exhibited symptoms of a neuropsychiatric disorder. However, single neurons or groups of homogeneous neurons may also be extracted from such cadavers, e.g., by laser capture microdissection (LCM). Using RNA amplification, gene expression profiles may be measured for these single cells as well (see, e.g., Eberwine et al., Proc. Natl. Acad. Sci. 1992, 89:30130-30134; and Luo et al., Nature Med. 1999, 5:117-119). Expression profiles obtained from these cells will therefore be particular for the particular cell types extracted, and may ultimately provide gene expression profiles that are more clearly ascribed to the particular cell population. Such gene profiles will typically be more robust, and therefore preferable, for evaluating a drug response.

[0097] Brain cells or tissues obtained from animals may also be used. For example, tissue or samples from animal models for a neuropsychiatric disorder may be used to model disease profiles for that disorder. Alternatively, expression profiles may be obtained from brain cells or tissues obtained from animals treated with a known anti-psychotic drug or with a test compound. In addition, cells from a transgenic animals may be employed, in which one or more genes relevant to a neuropsychiatric disorder have been altered, over-expressed or “knocked-out”. High throughput in vitro screening of candidate compounds may then be carried out using neuronal cells obtained or derived from such a transgenic animal.

[0098] Neuronal Cells. In preferred embodiments, the MPHTS methods of the invention also used cultured cells or cell lines to screen for candidate therapeutic compounds. Preferably, the cells are ones having an expression profile that is typical of neuronal cells or, alternatively, they may be cells which can be manipulated to produce an expression profile typical of neuronal cells. The cells or cell lines used will also, preferably, give rise to reproducible changes in their gene expression profiles when contacted with known antipsychiatric drugs (for example, valproate). In a particularly preferred embodiment, these changes will be opposite changes that are observed in the disease signature. That is to say, in such embodiments, genes (or their homologs) normally expressed at higher levels in the disease signature are preferably expressed at lower levels in cells or cell lines contacted with the known antipsychiatric drug, and vice-versa.

[0099] In a preferred embodiment, pluripotent neuronal stem cell lines are used in these aspects of the invention. Such cell lines are well known in the art, and methods to induce or enhance the differentiation of such stem cell lines have been described. For example, U.S. Provisional Patent Application Serial Nos. 60/299,152 and 60/299,066 (both filed on Jun. 18, 2001) describe methods for inducing differentiation in neuronal stem cells by exposure to chemicals (for example, valproate and buspirone). In other embodiments, such cells may be differentiated, e.g., using antisense strategies and/or routine techniques of molecular biology to develop stable, transfected cell lines. Alternatively, however, cells or cell lines may also be obtained from patients having a neuropsychiatric disorder of interest.

[0100] A skilled artisan will readily appreciate that cells or cell cultures used in the methods of this invention should be carefully controlled for parameters such as the cell passage number, cell density (e.g., in microplate wells), the method(s) by which cells are dispensed, and growth time after dispensing. It is also preferable to repeat mRNA and/or protein expression levels measured for a cell or cell line under particular conditions, to confirm that the measured levels are reproducible.

### 5.4. Measuring Gene Expression Using Nucleic Acid Arrays

[0101] The MPHTS methods and assays of the present invention may be implemented using any method suitable for measuring changes in the gene expression of a cell or cells. Such methods are well known and routinely used in the art. In preferred embodiments, methods are used that permit the simultaneous measurement of expression for a plurality of genes (e.g., at least 10, more preferably at least 100, still more preferably at least 1,000 and even more preferably at least 10,000). For example, in particularly preferred embodiments expression profiles are measured using “transcript arrays” or “microarrays”, described below. However, any technique that is capable of measuring gene expression may be used and the methods of this invention are not limited to the use of nucleic acid microarrays. For instance, gene expression may also be measured in a preferred alternative embodiment by using a reverse transcription polymerase chain reaction (“RT-PCR”).

[0102] Systems and kits for implementing such assays are commercially available from a number of suppliers, including Affymetrix (Santa Clara, Calif.), Agilent (Palo Alto, Calif.), Promega (Madison, Wis.), Xanthon (Research Triangle Park, N.C.), Illumina (San Diego, Calif.), Chromagen (San Diego, Calif.), Third Wave Technologies (Madison, Wis.), Aclara (Mountain View, Calif.), Beckton Dickinson & Co. (Franklin Lakes, N.J.) and Luminex (Austin, Tex.) to name a few.

[0103] Transcript Arrays Generally. In a preferred embodiment the present invention makes use of “transcript arrays” (also called herein “microarrays”). Transcript arrays can be employed for analyzing the steady state level of mRNAs in a cell, and especially for comparing the steady state levels between two cells, such as a first cell that has been exposed to a drug, drug candidate or other compound, and a second cell that has not been treated.

[0104] In one embodiment, transcript arrays are produced by hybridizing detectably labeled polynucleotides representing the mRNA transcripts present in a cell (e.g., fluorescently labeled cDNA synthesized from total cell mRNA) to a microarray. As explained in the definitions, supra, microarray is a surface with an ordered array of binding (e.g., hybridization) sites for products of many of the genes in the genome of a cell or organism, preferably most or almost all of the genes. Microarrays can be made in a number of ways, of which several are described below. However produced, microarrays share certain characteristics. The arrays are preferably reproducible, allowing multiple copies of a given array to be produced and easily compared with each other. Preferably the microarrays are small, usually smaller than 5 cm², and they are made from materials that are stable under binding (e.g., nucleic acid hybridization) conditions. A given binding site or unique set of binding sites in the microarray will specifically bind the product of a single gene in the cell. Although there may be more than one physical binding site (hereinafter “site”) per specific mRNA, for the sake of clarity the discussion below will assume that there is a single site. It will be appreciated that when cDNA complementary to the RNA of a cell is made and hybridized to a microarray under suitable hybridization conditions, the level of hybridization to the site in the array corresponding to any particular gene will reflect the prevalence in the cell of mRNA transcribed from that gene. For example, when detectably labeled (e.g., with a fluorophore) cDNA complementary to the total cellular mRNA is hybridized to a microarray, the site on the array corresponding to a gene (i.e., capable of specifically binding a nucleic acid product of the gene) that is not transcribed in the cell will have little or no signal, and a gene for which the encoded mRNA is prevalent will have a relatively strong signal.

[0105] In preferred embodiments, cDNAs from two different cells, e.g., a cell exposed to a test compound and a cell of the same type not exposed to the compound, are hybridized to the binding sites of the microarray. The cDNA derived from each of the two cell types are differently labeled so that they can be distinguished. In one embodiment, for example, cDNA from a cell treated with a drug is synthesized using a fluorescein-labeled dNTP, and cDNA from a second cell, not drug-exposed, is synthesized using a rhodamine-labeled dNTP. When the two cDNAs are mixed and hybridized to the microarray, the relative intensity of signal from each cDNA set is determined for each site on the array, and any relative difference in abundance of a particular mRNA detected.

[0106] In the example described above, the cDNA from the treated cell will fluoresce green when the fluorophore is stimulated and the cDNA from the untreated cell will fluoresce red. As a result, when the compound has no effect, either directly or indirectly, on the relative abundance of a particular mRNA in a cell, the mRNA will be equally prevalent in both cells and, upon reverse transcription, red-labeled and green-labeled cDNA will be equally prevalent. When hybridized to the microarray, the binding site(s) for that species of RNA will emit wavelengths characteristic of both fluorophores. In contrast, when the cell is exposed to a compound that, directly or indirectly, increases the prevalence of the mRNA in the cell, the ratio of green to red fluorescence will increase. When the drug decreases the mRNA prevalence, the ratio will decrease.

[0107] The use of a two-color fluorescence labeling and detection scheme to define alterations in gene expression has been described, e.g., in Shena et al., Science 1995, 270:467-470. An advantage of using cDNA labeled with two different fluorophores is that a direct and internally controlled comparison of the mRNA levels corresponding to each arrayed gene in two cell states can be made, and variations due to minor differences in experimental conditions (e.g., hybridization conditions) will not affect subsequent analyses. However, it will be recognized that it is also possible to use cDNA from a single cell, and compare, for example, the absolute amount of a particular mRNA in, e.g., a treated and untreated cell.

[0108] Preparation of Microarrays. Nucleic acid microarrays are known in the art and preferably comprise a surface to which probes that correspond in sequence to gene products (e.g., cDNAs, mRNAs, cRNAs, polypeptides, and fragments thereof), can be specifically hybridized or bound at a known position. In one embodiment, the microarray is an array in which each position represents a discrete binding site for a product encoded by a gene (e.g., a protein or RNA), and in which binding sites are present for products of most or almost all of the genes in the organism's genome. In a preferred embodiment, the “binding site” (hereinafter, “site”) is a nucleic acid or nucleic acid analogue to which a particular cognate cDNA or cRNA can specifically hybridize. The nucleic acid or analogue of the binding site can be, e.g., a synthetic oligomer, a full-length cDNA, a less-than full-length cDNA, or a gene fragment.

[0109] Although in a preferred embodiment the microarray contains binding sites for products of all or almost all genes in the target organism's genome, such comprehensiveness is not necessarily required. Usually the microarray will have binding sites corresponding to at least about 50% of the genes in the genome, often at least about 75%, more often at least about 85%, even more often more than about 90%, and most often at least about 99%. Preferably, the microarray has binding sites for genes relevant to the action of a drug of interest. A “gene” is identified as a segment of DNA containing an open reading frame (ORF) of preferably at least 50, 75, or 99 amino acids from which a messenger RNA is transcribed in the organism (e.g., if a single cell) or in some cell in a multicellular organism. The number of genes in a genome can be estimated from the number of mRNAs expressed by the organism, or by extrapolation from a well-characterized portion of the genome. When the genome of the organism of interest has been sequenced, the number of ORFs can be determined and mRNA coding regions identified by analysis of the DNA sequence.

[0110] Preparing Nucleic Acids for Microarrays. As noted above, the “binding site” to which a particular cognate cDNA specifically hybridizes is usually a nucleic acid or nucleic acid analogue attached at that binding site. In one embodiment, the binding sites of the microarray are DNA polynucleotides corresponding to at least a portion of each gene in an organism's genome. These DNAs can be obtained by, e.g., polymerase chain reaction (PCR) amplification of gene segments from genomic DNA, cDNA (e.g., by RT-PCR), or cloned sequences. PCR primers are chosen, based on the known sequence of the genes or cDNA, that result in amplification of unique fragments (i.e. fragments that do not share more than 10 bases of contiguous identical sequence with any other fragment on the microarray). Computer programs are useful in the design of primers with the required specificity and optimal amplification properties. See, e.g., Oligo version 5.0 (National Biosciences). In the case of binding sites corresponding to very long genes, it will sometimes be desirable to amplify segments near the 3′ end of the gene so that when oligo-dT primed cDNA probes are hybridized to the microarray, less-than-full length probes will bind efficiently. Typically each gene fragment on the microarray will be between about 50 bp and about 2000 bp, more typically between about 100 bp and about 1000 bp, and usually between about 300 bp and about 800 bp in length. PCR methods are well known and are described, for example, in Innis et al., eds., 1990, PCR Protocols: A Guide to Methods and Applications, Academic Press Inc. San Diego, Calif. It will be apparent that computer controlled robotic systems are useful for isolating and amplifying nucleic acids.

[0111] An alternative means for generating the nucleic acid for the microarray is by synthesis of synthetic polynucleotides or oligonucleotides, e.g., using N-phosphonate or phosphoramidite chemistries (Froehler et al., Nucleic Acid Res. 1986, 14:5399-5407; McBride et al., Tetrahedron Lett. 1983, 24:245-248). Synthetic sequences are between about 15 and about 500 bases in length, more typically between about 20 and about 50 bases. In some embodiments, synthetic nucleic acids include non-natural bases, e.g., inosine. As noted above, nucleic acid analogues may be used as binding sites for hybridization. An example of a suitable nucleic acid analogue is peptide nucleic acid (see, for example, Egholm et al., Nature 1993, 365:566-568. See, also, U.S. Pat. No. 5,539,083).

[0112] In an alternative embodiment, the binding (hybridization) sites are made from plasmid or phage clones of genes, cDNAs (e.g., expressed sequence tags), or inserts therefrom (Nguyen et al., Genomics 1995, 29:207-209). In yet another embodiment, the polynucleotide of the binding sites is RNA.

[0113] Attaching Nucleic Acids to the Solid Surface. The nucleic acids or analogues are attached to a solid support, which may be made from glass, plastic (e.g., polypropylene, nylon), polyacrylamide, nitrocellulose, or other materials. A preferred method for attaching the nucleic acids to a surface is by printing on glass plates, as is described generally by Schena et al., Science 1995, 270:467-470. This method is especially useful for preparing microarrays of cDNA. See also DeRisi et al., Nature Genetics 1996, 14:457-460; Shalon et al., Genome Res. 1996, 6:639-645; and Schena et al., Proc. Natl. Acad. Sci. USA 1995, 93:10539-11286.

[0114] A second preferred method for making microarrays is by making high-density oligonucleotide arrays. Techniques are known for producing arrays containing thousands of oligonucleotides complementary to defined sequences, at defined locations on a surface using photolithographic techniques for synthesis in situ (see, Fodor et al., Science 1991, 251:767-773; Pease et al., Proc. Natl. Acad. Sci. USA 1994, 91:5022-5026; Lockhart et al., Nature Biotech. 1996, 14:1675. See, also, U.S. Pat. Nos. 5,578,832; 5,556,752; and 5,510,270) or other methods for rapid synthesis and deposition of defined oligonucleotides (Blanchard et al., Biosensors & Bioelectronics 1996, 11:687-90). When these methods are used, oligonucleotides (e.g., 20-mers) of known sequence are synthesized directly on a surface such as a derivatized glass slide. Usually, the array produced is redundant, with several oligonucleotide molecules per RNA. Oligonucleotide probes can be chosen to detect alternatively spliced mRNAs.

[0115] Other methods for making microarrays, e.g., by masking (Maskos and Southern, Nuc. Acids Res. 1992, 20:1679-1684), may also be used. In principal, any type of array, for example, dot blots on a nylon hybridization membrane (see, Sambrook et al., Molecular Cloning—A Laboratory Manual (2nd Ed.), Vol. 1-3, Cold Spring Harbor Laboratory, Cold Spring Harbor, N.Y., 1989), could be used, although, as will be recognized by those of skill in the art, very small arrays will be preferred because hybridization volumes will be smaller.

[0116] Generating Labeled Probes. Methods for preparing total and poly(A)⁺ RNA are well known and are described generally in Sambrook et al., supra. In one embodiment, RNA is extracted from cells of the various types of interest in this invention using guanidinium thiocyanate lysis followed by CsCl centrifugation (Chirgwin et al., Biochemistry 1979, 18:5294-5299). Poly(A)⁺ RNA is selected by selection with oligo-dT cellulose (see Sambrook et al., supra). Cells of interest may include, but are not limited to, wild-type cells, drug-exposed wild-type cells, modified cells, and drug-exposed modified cells.

[0117] Labeled cDNA is prepared from mRNA by oligo dT-primed or random-primed reverse transcription, both of which are well known in the art (see, for example, Klug & Berger, Methods Enzymol. 1987, 152:316-325). Reverse transcription may be carried out in the presence of a dNTP conjugated to a detectable label, most preferably a fluorescently labeled dNTP. Alternatively, isolated mRNA can be converted to labeled antisense RNA synthesized by in vitro transcription of double-stranded cDNA in the presence of labeled NTPs (Lockhart et al., Nature Biotech. 1996, 14:1675). In alternative embodiments, the cDNA or RNA probe can be synthesized in the absence of detectable label and may be labeled subsequently, e.g., by incorporating biotinylated dNTPs or NTP, or some similar means (e.g., photo-cross-linking a psoralen derivative of biotin to RNAs), followed by addition of labeled streptavidin (e.g., phycoerythrin-conjugated streptavidin) or the equivalent.

[0118] When fluorescently-labeled probes are used, many suitable fluorophores are known, including fluorescein, lissamine, phycoerythrin, rhodamine (Perkin Elmer Cetus), Cy2, Cy3, Cy3.5, Cy5, Cy5.5, Cy7, FluorX (Amersham) and others (see, e.g., Kricka, 1992, Nonisotopic DNA Probe Techniques, Academic Press San Diego, Calif.). It will be appreciated that pairs of fluorophores are chosen that have distinct emission spectra so that they can be easily distinguished.

[0119] In another embodiment, a label other than a fluorescent label is used. For example, a radioactive label, or a pair of radioactive labels with distinct emission spectra, can be used (see Zhao et al., Gene 1995, 156:207; Pietu et al., Genome Res. 1996, 6:492). However, because of scattering of radioactive particles, and the consequent requirement for widely spaced binding sites, use of radioisotopes is a less-preferred embodiment.

[0120] In one embodiment, labeled cDNA is synthesized by incubating a mixture containing 0.5 mM dGTP, dATP and dCTP plus 0.1 mM dTTP plus fluorescent deoxyribonucleotides (e.g., 0.1 mM Rhodamine 110 UTP (Perken Elmer Cetus) or 0.1 mM Cy3 dUTP (Amersham)) with reverse transcriptase (e.g., SuperScript.TM. II, LTI Inc.) at 42° C. for 60 min.

[0121] Hybridization to Microarrays. Nucleic acid hybridization and wash conditions are chosen so that the probe “specifically binds” or “specifically hybridizes” to a specific array site, i.e., the probe hybridizes, duplexes or binds to a sequence array site with a complementary nucleic acid sequence but does not hybridize to a site with a non-complementary nucleic acid sequence. As used herein, one polynucleotide sequence is considered complementary to another when, if the shorter of the polynucleotides is less than or equal to 25 bases, there are no mismatches using standard base-pairing rules or, if the shorter of the polynucleotides is longer than 25 bases, there is no more than a 5% mismatch. Preferably, the polynucleotides are perfectly complementary (no mismatches). It can easily be demonstrated that specific hybridization conditions result in specific hybridization by carrying out a hybridization assay including negative controls (see, e.g., Shalon et al., supra; and Chee et al., supra).

[0122] Optimal hybridization conditions will depend on the length (e.g., oligomer versus polynucleotide greater than 200 bases) and type (e.g., RNA, DNA, PNA) of labeled probe and immobilized polynucleotide or oligonucleotide. General parameters for specific (i.e., stringent) hybridization conditions for nucleic acids are described in the definitions provided in Section 5.1, supra. When cDNA microarrays, such as those described by Schena et al. are used, typical hybridization conditions are hybridization in 5× SSC plus 0.2% SDS at 65° C. for 4 hours, followed by washes at 25° C. in low stringency wash buffer (e.g., 1× SSC plus 0.2% SDS) followed by 10 minutes at 25° C. in high stringency wash buffer (0.1× SSC plus 0.2% SDS). See, Shena et al., Proc. Natl. Acad. Sci. USA 1996, 93:10614). Useful hybridization conditions are also provided in, e.g., Tijessen, 1993, Hybridization With Nucleic Acid Probes, Elsevier Science Publishers B. V. See, also, Kricka, 1992, Nonisotopic DNA Probe Techniques, Academic Press, San Diego, Calif.

[0123] Signal Detection and Analysis. When fluorescently labeled probes are used, the fluorescence emissions at each site of a transcript array can be preferably detected by scanning confocal laser microscopy. In one embodiment, a separate scan, using the appropriate excitation line, is carried out for each of the two fluorophores used. Alternatively, a laser can be used that allows simultaneous specimen illumination at wavelengths specific to the two fluorophores and emissions from the two fluorophores can be analyzed simultaneously (see, Shalon et al., Genome Research 1996, 6:639-645). In a preferred embodiment, the arrays are scanned with a laser fluorescent scanner with a computer controlled X-Y stage and a microscope objective. Sequential excitation of the two fluorophores is achieved with a multi-line, mixed gas laser and the emitted light is split by wavelength and detected with two photomultiplier tubes. Fluorescence laser scanning devices are described in Schena et al., Genome Res. 1996, 6:639-645 and in other references cited herein. Alternatively, the fiber-optic bundle described by Ferguson et al., Nature Biotech. 1996, 14:1681-1684, may be used to monitor mRNA abundance levels at a large number of sites simultaneously.

[0124] Signals are recorded and, in a preferred embodiment, analyzed by computer, e.g., using a 12 bit analog to digital board. In one embodiment the scanned image is despeckled using a graphics program (e.g., Hijaak Graphics Suite) and then analyzed using an image gridding program that creates a spreadsheet of the average hybridization at each wavelength at each site. If necessary, an experimentally determined correction for “cross talk” (or overlap) between the channels for the two fluors may be made. For any particular hybridization site on the transcript array, a ratio of the emission of the two fluorophores can be calculated. The ratio is independent of the absolute expression level of the cognate gene, but is useful for genes whose expression is significantly modulated, e.g., by administering a drug, drug-candidate or other compound, or by any other tested event.

[0125] In one preferred embodiment of the invention, the relative abundance of an mRNA in two cells or cell lines tested (e.g., in a treated verses untreated cell) may be scored as perturbed (i.e., where the abundance is different in the two sources of mRNA tested) or as not perturbed (i.e., where the relative abundance in the two sources is the same or is unchanged). Preferably, the difference is scored as perturbed if the difference between the two sources of RNA of at least a factor of about 25% (i.e., RNA from one sources is about 25% more abundant than in the other source), more preferably about 50%. Still more preferably, the RNA may be scored as perturbed when the difference between the two sources of RNA is at least about a factor of two. Indeed, the difference in abundance between the two sources may be by a factor of three, of five, or more.

[0126] In other embodiments, it may be advantageous to also determine the magnitude of the perturbation. This may be done, as noted above, by calculating the ratio of the emission of the two fluorophores used for differential labeling, or by analogous methods that will be readily apparent to those of skill in the art.

### 5.5. Bioinformatics and Statistics

[0127] Those skilled in the art will readily appreciate that the MPHTS assays of this invention will, at least in preferred embodiments, track a large amount of data from many sources including, e.g., expression levels for a large number of different genes in a variety of different cell and tissue types and under a variety of different conditions. The invention therefore preferably makes use of methods in bioinformatics and statistical analysis to integrate such data. Such analysis tools include, for example, clustering and class partitioning algorithms that enable a user to summarize and visualize effects of multiple variables on relationships within a data set. In a particularly preferred embodiment, the MPHTS methods of this invention make use of a statistical analysis tool referred to as “Principal Component Analysis” or “PCA”. The technique is well known in the art and may be implemented, e.g., using commercially available software such as the Partek suite of pattern recognition tools (Partek Inc., St. Charles, Minn.).

[0128] By PCA analysis of gene expression data from different brain areas and disease states, a user is able to readily identify whether the major source or sources of variance within the data set are correlated with the particular cells or tissue and/or whether such variance is correlated with a neuropsychiatric disorder of interest. An exemplary figure depicting this analysis is set forth here, in FIG. 2. Those skilled in the art will readily appreciate and/or be able to select appropriate cutoffs (e.g., a maximum significant p-value) for use in such methods.

[0129] Statistically significant changes in gene expression may also be identified by coordinately regulated genes in distinct pathways, as well as coordinate changes of multiple genes within a common pathway (e.g., genes involved in a common metabolic pathway or process). These provide an aggregate level of statistical significance that far exceeds the statistical significance obtained for the genes individually.

[0130] In preferred embodiments, RNA extraction and/or hybridization experiments are repeated at least once, and more preferably multiple times for each sample to assure statistically robust and reproducible results. Changes in gene expression that appear to be statistically significant may also be confirmed by an independent experimental technique such as real-time polymerase chain reaction (RT-PCR), quantitative in situhybridization, immunohistochemistry and functional assays of the translated protein(s), all of which are well known and routinely used in the art.

### 6. EXAMPLES

[0131] The invention is further described here by means of the following examples. In particular, Examples 1-2 describe experiments where expression levels are measured for a plurality of different genes in neuronal cells that are exposed in vitro to valproate, a known therapeutic compound for treating bipolar affective disorder (BAD). Exemplary signature genes are identified from these experiments and are provided in Tables 1-3 of those examples. In addition, Example 2 also reports signature genes for another compoumd, vasoactive intestinal peptide (VIP) used to treat neuropsychiatric disorders. These genes are listed in Table 4 of that example.

[0132] Similar experiments are also described in Example 3. In particular, this example describes experiments where signature genes and drug signatures are obtained by measuring expression levels from cells and tissues that have been exposed to valproate in vivo rather than in vitro. Exemplary signature genes identified in such experiments are also provided, infra, in Table 5. Still other experiments are described in Example 4, where disease signature genes for various neuropsychiatric disorders are identified, including exemplary genes from schizophrenic and bipolar disorders.

[0133] The invention also provides methods for selecting particular “signature genes” for use in an MPHTS assay, and such selection methods are also considered part of the present invention. Accordingly, a detailed description of such methods and algorithms is provided in Example 5, below. Example 6 then provides preferred sets of “efficacy genes” that may be identified by such a method. These gene sets are useful, e.g., in high throughput screening assays of the invention to identify candidate compounds that may or are likely to be useful for treating neuropsychiatric disorders such as bipolar affective disorder (BAD) or for treating a neurodegenerative disorder such as Alzheimer's disease or Parkinsons disease.

[0134] Finally, Example 7 describes experiments that demonstrate the efficacy of such screening assays. In particular, the example describes experiments that monitor changes in the expression of certain efficacy genes when cells are exposed to a drug treatment, using standard commercial screening platforms that are readily available in the art.

[0135] As noted above, Examples such as these are provided merely to clarify the description of the present invention and the invention is not limited to the particular, exemplary embodiments described therein.

### EXAMPLE 1: VALPROATE INDUCED CHANGES IN GENE EXPRESSION PROFILES

[0136] This example describes experiments, which analyzed changes in the expression profile for rat (rattus norvegicus) neuronal cells induced by valproate, a drug used clinically to treat neuropsychiatric disorders such as bipolar disorder. Expression levels for about 8500 genes were evaluated, and genes whose expression levels changed significantly in response to treatment with valproate were identified. Expression profiles for these genes are compared to expression profiles for orthologous genes in human schizophrenia patients. These data demonstrate that the genes are useful, e.g., for monitoring treatment and therapies for neuropsychiatric disorders (including treatments and therapies for disorders such as schizophrenia and bipolar disorder), as well as in screening methods that identify novel therapeutic compounds.

[0137] Primary neuron cells were isolated from E19 rat embryos and cultured as follows. First, the cortex was dissected from each embryo and placed in HBSS solution. The HBSS solution was subsequently removed and replaced with 5 ml papain solution at a concentration of 10 units per ml. The cortex was then incubated in the papain solution for 10 minutes and at 37° C. After incubation, the Papain solution was removed and 10% NuSerum media (Becton Dickinson, Bedford Mass.) was added in its place. The cortex was then centrifuged at 1000 rpm for 10 minutes, after which time the solution was removed and 1 ml of media containing 0.1% DNase was added. Cells were titurated immediately to break up the tissue. The volume of the cell suspensions was brought up to 15 ml and the cells were counted.

[0138] Approximately 4×10⁶ cells were plated per 10 cm dish, in NeuroBasal A (Invitrogen Corp., Carlsbad Calif.) medium containing B27 and insulin (25 μg/ml). The cell cultures were incubated in a humidified incubator with 5% CO₂ and at 37° C. The culture media were changed every 2 days. Cells were incubated in 0.5 mM valproate for 3 days. Control cultures were also prepared and incubated under the same conditions (including the carrier DMSO) but without valproate.

[0139] mRNA was extracted from each group of cultures and expression profiles were measured on microarrays according to standard techniques (see the Detailed Description section, infra). Data from duplicate microarrays was statistically evaluated to identify genes that are differentially expressed in the presence of valproate, relative to expression levels in the absence of valproate.

[0140] Table 1, below, lists the twelve genes identified in these experiments as being differentially expressed in the presence of valproate, relative to its expression level in the absence of valproate. These genes were identified using a Rat Toxicology array from Incyte (Palo Alto, Calif.). Each gene is listed in Table 1 by its common or popular name, along with the GenBank Accession and Gene Identification (GI) numbers of the rat gene whose expression level was evaluated in these experiments. The “expression ratio” measured for each gene is also specified. Specifically, the expression ratio, Φ, was calculated using the formula:

$$Φ = \frac{{E}_{v}}{{E}_{0}} , \text{if} {E}_{v} ⟩ {E}_{0}$$

$$Φ = - \frac{{E}_{0}}{{E}_{v}} , \text{if} {E}_{v} ⟨ {E}_{0}$$

[0141] where Eᵥ is the expression level measured in cells incubated with valproate and Eₒ is the expression level in the absence of valproate. A positive expression ratio therefore indicates that a gene is “upregulated” in the presence of valproate; i.e., its expression level increased (Eᵥ>Eₒ). By contrast, a negative expression ratio indicates that the gene is “downregulated” in the presence of valproate, or that its expression level decreased (Eᵥ<Eₒ).

[0142] A cDNA sequence for each of these genes is also provided in the accompanying Sequence Listing, and the sequence identifier (SEQ ID NO.) from this Sequence Listing is also provided in Table 1, next to the GenBank accession number.

TABLE 1

| | Accession No. | |
|---|---|---|
| Gene Name: | (SEQ ID NO.) | Φ |
| myelin-associated glycoprotein | M22357 (GI: 205271) | 2.16 |
| (MAG) | (SEQ ID NO: 1) | |
| 2′,3′-cyclic nucleotide-3′ | M18630 (GI: 203492) | 1.92 |
| phosphodiesterase (CNPI) | (SEQ ID NO: 2) | |
| GAP-43 | L21191 (GI: 310119) | −1.88 |
| | (SEQ ID NO: 3) | |
| SCG10 | AY004290 (GI: 9547314) | −1.43 |
| | (SEQ ID NO: 4) | |
| calmodulin | AF178845 (GI: 5901754) | −1.95 |
| | (SEQ ID NO: 5) | |
| calcineurin A | M29275 (GI: 203494) | −1.43 |
| | (SEQ ID NO: 6) | |
| protein kinase C-binding | U48245 (GI: 1199662) | −1.7 |
| protein NELL2 | (SEQ ID NO: 7) | |
| kinesin light chain C | M75148 (GI: 205080) | −1.53 |
| | (SEQ ID NO: 8) | |
| cysteine-rich protein | U09567 (GI: 563809) | 1.49 |
| | (SEQ ID NO: 9) | |
| hypoxanthine-guanine | M86443 (GI: 204660) | −1.37 |
| phosphoribosyltransferase | (SEQ ID NO: 10) | |
| selenoprotein P | D25221 (GI: 1020410) | 1.51 |
| | (SEQ ID NO: 11) | |
| plasma membrane calcium ATPase | J03753 (GI: 203046) | −1.36 |
| | (SEQ ID NO: 12) | |

[0143] Homologs and/or orthologs of the art genes recited, supra, in Table 1 may be readily identified, e.g., by their level of sequence identity to the recited rat nucleic acid sequences, or by the level of sequence identity and/or homology of the amino acid sequences they encode. Alternatively, homologs and orthologs (including those from other species) may be identified by hybridization under conditions of appropriate stringency, described in the definitions (see the Detailed Description section, supra). In a preferred embodiment, appropriate homologs and/or orthologs (e.g., from other species) are identified using a database, such as the NCBI Unigene database, that groups genes into appropriate clusters of homologous sequences from the same and/or different species of organism. See, e.g., Schuler, J. Mol. Med. 1997, 75(10):694-698; Schuler et al., Science 1996, 274:540-546; Boguski & Schuler, Nature Genetics 1995, 10:369-371. See, also, the internet web page URL <http://www.ncbi.nlm.nih.gov/UniGene/>(Accessed Jun. 18, 2001).

[0144] Genome wide expression analyses have previously indicated that human orthologs to the genes listed in Table 1, above, may be involved in neuropsychiatric disorders such a schizophrenia. See, Hakak et al., Proc. Natl. Acad. Sci. U.S.A. 2001, 98:4746-4751. Specifically, these studies have suggested that a human ortholog for each rat gene recited, above, in Table 1 is aberrantly expressed in brain tissue from schizophrenic patients relative to expression levels in brain tissue from non-schizophrenic individuals. Table 2, below, lists each of these genes along with the GenBank Accession and GI numbers for each human ortholog. The nucleotide sequence for each human ortholog is also provided here, in the accompanying Sequence Listing, and its sequence identifier is presented in Table 2 with the GenBank accession number. The expression ratio previously reported (Hakak et al., supra) for each human ortholog in schizophrenic, relative to non-schizophrenic patients, is also specified in Table 2, along with the valproate expression ratio reported in Table 1, above. In addition, the Unigene cluster number from a recent compilation (“build” number 133) of the NCBI Unigene database for each human gene and its rat homolog is provided in the far right column of Table 2.

TABLE 2

| human orthologs: | | rat orthologs: | | |
|---|---|---|---|---|
| Accession No. | Φ (Schizo- | Accession No. | Φ (Val- | Unigene |
| (SEQ ID NO.) | phrenia) | (SEQ ID NO.) | proate) | Cluster No. |
| M29273 | −1.52 | M22357 | 2.16 | Hs. 1780 |
| (GI: 187292) | | (GI: 205271) | | |
| (SEQ ID | | (SEQ ID NO: 1) | | |
| NO: 13) | | | | |
| M19650 | −1.87 | M18630 | 1.92 | Hs. 150741 |
| (GI: 180686) | | (GI: 203492) | | |
| (SEQ ID | | (SEQ ID NO: 2) | | |
| NO: 14) | | | | |
| S66541 | 1.42 | L21191 | −1.88 | Hs. 79000 |
| (GI: 440922) | | (GI: 310119) | | |
| (SEQ ID | | (SEQ ID NO: 3) | | |
| NO: 15) | | | | |
| S82024 | 1.5 | AY004290 | −1.43 | Hs. 90005 |
| (GI: 1478502) | | (GI: 9547314) | | |
| (SEQ ID | | (SEQ ID NO: 4) | | |
| NO: 16) | | | | |
| J04046 | 1.43 | AF178845 | −1.95 | Hs. 141011 |
| (GI: 179887) | | (GI: 5901754) | | |
| (SEQ ID | | (SEQ ID NO: 5) | | |
| NO: 17) | | | | |
| M29551 | 1.59 | M29275 | −1.43 | Hs. 151531 |
| (GI: 180708) | | (GI: 203494) | | |
| (SEQ ID | | (SEQ ID NO: 6) | | |
| NO: 18) | | | | |
| D83018 | 1.44 | U48245 | −1.7 | Hs. 79389 |
| (GI: 1827484) | | (GI: 1199662) | | |
| (SEQ ID | | (SEQ ID NO: 7) | | |
| NO: 19) | | | | |
| L04733 | 1.42 | M75148 | −1.53 | Hs. 117977 |
| (GI: 307084) | | (GI: 205080) | | |
| (SEQ ID | | (SEQ ID NO: 8) | | |
| NO: 20) | | | | |
| M76378 | −1.43 | U09567 | 1.49 | Hs. 108080 |
| (GI: 181063) | | (GI: 563809) | | |
| (SEQ ID | | (SEQ ID NO: 9) | | |
| NO: 21) | | | | |
| M31642 | 1.41 | M86443 | −1.37 | Hs. 82314 |
| (GI: 184349) | | (GI: 204660) | | |
| (SEQ ID | | (SEQ ID NO: 10) | | |
| NO: 22) | | | | |
| Z11793 | −1.41 | D25221 | 1.51 | Hs. 3314 |
| (GI: 36425) | | (GI: 1020410) | | |
| (SEQ ID | | (SEQ ID NO: 11) | | |
| NO: 23) | | | | |
| X63575 | 1.47 | J03753 | −1.36 | Hs. 305923 |
| (GI: 2193883) | | (GI: 203046) | | |
| (SEQ ID | | (SEQ ID NO: 12) | | |
| NO: 24) | | | | |

[0145] A comparison of the expression levels set forth in Table 2 for each gene shows that valproate effectively reverses the abnormal expression levels associated with each gene. Specifically, for each gene in Table 2 that is up-regulated in schizophrenia, the gene is down-regulated in neuronal cells when contacted with valproate. Conversely, each gene that is down-regulated in schizophrenia is up-regulated in neuronal cells when they are contacted with valproate.

[0146] These data therefore demonstrate that each of the genes listed in Tables 1 and 2, above, is useful not only for identifying (e.g., diagnosing) individuals having a neuropsychiatric disorder such as schizophrenia, but also for monitoring a therapy (for example a drug treatment) or treatment for such a disorder. Early diagnosis of a particular neurospsychiatric disease or disorder may prevent progressive debilitating effects typically occurring with such conditions. To accomplished this, the gene expression profile from peripheral tissues such as lymphocytes may be used. Comparison of changes in the gene expression profiles of central nervous system tissue to that of a peripheral tissue may then establish a correlation useful for the diagnosis of a neuropsychiatric or neurodegenerative disorder.

[0147] In addition, each gene listed in the above tables can also be used in screening assays, e.g., by screening for compounds that affect expression of these genes in cells (for example, neuronal cells) and/or in individual subjects. More specifically, the genes can be used in screening assays that identify compounds affecting the expression of one or more of these genes in a way that is similar or identical to the expression changes described here for valproate. Such compounds are expected to have similar pharmaceutical affects to valproate in individual, and are therefore candidate pharmaceutical compounds, e.g., for treating a neuropsychiatric disorder such as schizophrenia or bipolar disorder.

### EXAMPLE 2: IDENTIFICATION OF ADDITIONAL SIGNATURE GENES

[0148] In addition to the twelve genes described, supra, in Example 1, at least thirty additional genes were identified as signature genes that can be used, e.g., in MPHTS or other assays to identify new therapeutics for neuropsychiatric disorders (including therapeutics for specific neuropsychiatric disorders such as schizophrenia and bipolar disorder). These signature genes are also useful for monitoring such new and existing (i.e., known) therapies for such neuropsychiatric disorders.

[0149] The additional signature genes described here were identified using a human neuroblastoma cell line that is known in the art as NBFL (see, Symes et al., Proc. Natl. Acad. Sci. U.S.A. 1993, 90(2):572-576). NBFL cell cultures were maintained in DMEM medium supplemented with L-glutmine, antibiotics, 10% fetal bovine serum and 5% horse serum. Before treatment, cells were passaged, allowed to adhere overnight, and the medium was replaced with serum free medium for 24 hours. The cells were then incubated for 24 hours in either the presence or absence of valproate (0.5 mM), and in the absence of serum. mRNA was extracted from each group of cultures and sent to a commercial company for expression profiling by hybridization to microarrays. Data from at least three independent microarray experiments was then statistically evaluated to identify genes that are differentially expressed in the presence of valproate, relative to expression levels in the absence of valproate.

[0150] Table 3, below, list each of the genes whose expression level changed in cells exposed to valproate, identified using a UniGem V2 array from Incyte (Palo Alto, Calif.) and also provides the expression ratio ((), defined in Example 1, supra) measured for each gene. Each gene is identified in Table 3 by its common name, as well as by the GenBank Accession and Gene Identification (GI) numbers for its nucleotide sequence. A cDNA sequence for each gene listed in Table 3 is also provided in the accompanying Sequence Listing, and its sequence identifier is specified in Table 3 along with the GenBank Accession number. Table 3 also indicates the Unigene cluster number for each gene from a recent build of the NCBI Unigene database.

TABLE 3

| | Accession No. | UNIGENE | |
|---|---|---|---|
| Gene Name: | (SEQ ID NO.) | cluster | Φ |
| nidogen (NID) | M30269 (GI: 189208 | Hs. 62041 | 1.7 |
| | (SEQ ID NO: 25) | | |
| silver (SIL) | BE892678 (GI: 10353262) | Hs. 95972 | 1.6 |
| | (SEQ ID NO: 26) | | |
| Homo sapiens clone | AF035308 (GI: 2661069) | Hs. 167036 | 1.5 |
| 23798 and 23825 | (SEQ ID NO: 27) | | |
| LIM protein | NM_006457 | Hs. 154103 | 1.4 |
| | (GI: 5453713) | | |
| | (SEQ ID NO: 28) | | |
| carnitine | M58581 (GI: 180988) | Hs. 274336 | 1.4 |
| palmitoyltransferase II | (SEQ ID NO: 29) | | |
| iduronate-2-sulfatase | AW896303 (GI: 8060508) | Hs. 172458 | 1.4 |
| | (SEQ ID NO: 30) | | |
| dynamin 1 | AW206374 (GI: 6505870) | Hs. 166161 | 1.4 |
| | (SEQ ID NO: 31) | | |
| myosin IB | BE395925 (GI: 9341290) | Hs. 286226 | 1.4 |
| | (SEQ ID NO: 32) | | |
| EGF-like-domain | AV751780 (GI: 10909628) | Hs. 158200 | 1.4 |
| | (SEQ ID NO: 33) | | |
| islet cell autoantigen 1 | NM_004968 | Hs. 167927 | −1.4 |
| | (GI: 4826767) | | |
| | (SEQ ID NO: 34) | | |
| regulator of G-protein | AI674877 (GI: 4875357) | Hs. 24950 | −1.4 |
| signaling 5 | (SEQ ID NO: 35) | | |
| XPA binding protein 1 | AI291094 (GI: 3933868) | Hs. 18259 | −1.4 |
| | (SEQ ID NO: 36) | | |
| P311 protein | AF119859 (GI: 7770154) | Hs. 142827 | −1.4 |
| | (SEQ ID NO: 37) | | |
| SWI/SNF | AJ011737 (GI: 4128022) | Hs. 159971 | −1.4 |
| | (SEQ ID NO: 38) | | |
| ALL1 | BF028022 (GI: 10735837) | Hs. 75823 | −1.4 |
| | (SEQ ID NO: 39) | | |
| RNA binding motif | NM_016836 | Hs. 241567 | −1.4 |
| | (GI: 8400717) | | |
| | (SEQ ID NO: 40) | | |
| SMAD1 | U59423 (GI: 1438076) | Hs. 79067 | −1.4 |
| | (SEQ ID NO: 41) | | |
| NADH dehydrogenase | BF307039 (GI: 11254147) | Hs. 5273 | −1.4 |
| (ubiquinone) | (SEQ ID NO: 42) | | |
| calmodulin 2 | BF671011 (GI: 11944906) | Hs. 182278 | −1.4 |
| | (SEQ ID NO: 43) | | |
| vimentin | AA451928 (GI: 2165597) | Hs. 297753 | −1.4 |
| | (SEQ ID NO: 44) | | |
| GRB2-associated | AK022142 (GI: 10433472) | Hs. 239706 | −1.5 |
| binding protein 1 | (SEQ ID NO: 45) | | |
| splicing factor 3b | AA158611 (GI: 4622789) | Hs. 195614 | −1.5 |
| (subunit 3) | (SEQ ID NO: 46) | | |
| DKFZp547DO26_r1 | AL134591 (GI: 6602778) | Hs. 79015 | −1.5 |
| (EST) | (SEQ ID NO: 47) | | |
| insulinoma-associated | NM_002196 | Hs. 89584 | −1.6 |
| 1 (INSM1) | (GI: 4504712) | | |
| | (SEQ ID NO: 48) | | |
| neuroendocrine | AV708862 (GI: 10726127) | Hs. 113368 | −1.6 |
| secretory protein 55 | (SEQ ID NO: 49) | | |
| v-yes-1 | NM_002350 | Hs. 8u0887 | −1.6 |
| | (GI: 4505054) | | |
| | (SEQ ID NO: 50) | | |
| chromodomain | NM_001272 | Hs. 25601 | −1.6 |
| helicase DNA binding | (GI: 4557450) | | |
| | (SEQ ID NO: 51) | | |
| cholinergic receptor | U62432 (GI: 1458111) | Hs. 89605 | −1.7 |
| | (SEQ ID NO: 52) | | |
| dopmine | Y00096 (GI: 30455) | Hs. 2301 | −1.7 |
| β-hydroxylase (DBH) | (SEQ ID NO: 53) | | |
| dopa | M88700 (GI: 181650) | Hs. 150403 | −2 |
| decarboxylase (DDC) | (SEQ ID NO: 54) | | |
| chromogranin B | Y00064 (GI: 36438) | Hs. 2281 | −2.1 |
| (CG-B) | (SEQ ID NO: 55) | | |

[0151] To validate differential expression measurements that were obtained using microarrays, expression levels were also measured using a reverse transcription polymerase chain reaction (RT-PCR) assay for five genes having the highest expression ratio in Table 3: nidogen (SEQ ID NO:25; σ=1.7), silver (SEQ ID NO:26; σ=1.6), dopamine β-hydroxylase (SEQ ID NO:53; σ=-1.7), dopa decarboxylase (SEQ ID NO:54; σ=−2) and chromogranin B (SEQ ID NO:55; σ=−2.1). These RT-PCR experiments were performed according to routine methods that are known in 10 the art. Briefly, RNA from the NBFL cell line treated with or without valproate was primed with oligo-dT and reverse transcribed. The resultant cDNA was subjected to either 25 or 30 rounds of PCR amplification, depending on the absolute expression level of the gene tested. The amount of PCR product generated from each sample was normalized to the amount of GAPDH amplified from each sample and a fold-change relative to valproate treatment was calculated. β-actin was used as an additional control.

[0152] The results from these experiments are shown graphically in FIG. 3. As expected, no change in β-actin (B-ACT) expression was detected (+/− one-fold) when cells were treated with valproate. However, a greater than 2-fold change in expression levels was measured for each of the five other genes tested: nidogoen (NID), silver (SIL), dopamine β-hydroxylase (DBH), dopa decarboxylase (DDC) and chromogranin B (CG-B). These changes are consistent with the changes measured using microarrays and presented in Table 3, supra.

[0153] VIP signature genes. Similar experiments were also performed in which cells were treated with vasoactive intestinal polypeptide (VIP), another drug useful for treating neuropsychiatric disorders. In more detail, stem cells were isolated and propagated from rat cortex. At passage 1, they were treated with 10 ng/ml ciliary neurotrophic factor (CNTF, available from R&D Systems, MN) for four days. 10 ng/ml of basic fibroblast growht factor (bFGF, R&D Systems, MN) was present in the medium on the first day of the differentiation regiment. Stem cells have been shown to differentiate into astrocyte cultures in the presence of CNTF (Rajan & McKay, J. Neurosci. 1998, 18:3620-3629). Cells were then treated with 5 μM VIP (Sigma) for one day and harvested for expression profiling.

[0154] Signature genes were identified that changed expression when contacted with VIP compared to untreated cells. Each of these genes is listed below in Table 4, along with the measured expression ratio (ρ) and the GenBank Accession number for an exemplary cDNA sequence. The exemplary cDNA sequence for each gene is also provided here in the accompanying sequence listing. Accordingly, an appropriate sequence identifier is also specified in Table 4 for each listed gene.

TABLE 4
VIP SIGNATURE GENES

| | Accession No. | |
|---|---|---|
| Gene Name: | (SEQ ID NO.) | σ |
| Cdk-inhibitor p57Kip2 | U22399 | −1.8 |
| | (SEQ ID NO: 163) | |
| Rat EGF like protein | AF112153 | 3.8 |
| | (SEQ ID NO: 164) | |
| Rat interferon induced mRNA | X61381 | 2.3 |
| | (SEQ ID NO: 165) | |
| similar to erythrocyte protein band 7.2 | BC003789 | 2.2 |
| | (SEQ ID NO: 166) | |
| Rat tyrosine phosphatase like protein IA-2a | U40682 | 2.0 |
| | (SEQ ID NO: 167) | |
| Rat Interferon inducdible protein 16 | AF164040 | 1.8 |
| | (SEQ ID NO: 168) | |
| rat Dahl salt resistant strain clone etb | U02094 | 1.8 |
| | (SEQ ID NO: 169) | |

### EXAMPLE 3: VALPROATE INDUCED CHANGES IN GENE EXPRESSION PROFILES IN VIVO

[0155] This example describes still other experiments in which signature genes were identified and/or confirmed by analyzing changes of expression profiles, in vivo.

[0156] Specifically, in these experiments rats were treated with valproate, and gene expression levels in the hippocampus of each rat were measured for a plurality of different genes.

[0157] In more detail, twenty rats were divided into two groups, containing ten individuals each. One group of ten rats was used as the control group, whereas the other group functioned as the experimental group. Each rat in the experimental group was injected twice daily with 250 mg valproate for each kilogram of the rat's body mass. Each rat in the control group was similarly injected, but with a vehicle that contained no active ingredient. After three weeks dosing, the rats were sacrificed and their brains removed. Each rat's brain was divided in half. The hippocampus was then removed from each half and flash frozen. The half hippocampus tissue from the rats in each group was combined and total RNA was extracted from the tissue using TriReagent (Invitrogen Corp., Carlsbad Calif.) following the manufacturer's instructions. mRNA was purified with Oligotext (Qiagen Inc., Valencia Calif.) following the manufacturer's recommended protocol. mRNA quality and concentration was determined using the Agilent Bioanalyzer.

[0158] For expression profile analysis, mRNA from the pooled tissues of the control group was measured with Cy3 dye, and mRNA from the pooled tissues of the experimental group was measured with Cy5 dye. The labeled probes were then mixed and hybridized to a Rat Tox3 microarray (Incyte Genomics, Palo Alto Calif.). The relative signal intensity from each fluorescent dye was measured for each element (i.e., for each “gene”) on the microarray, normalized for differences, and the relative difference in expression level determined.

[0159] The relative differences in expression levels for various genes are plotted in FIG. 4. Specifically, each point on the plot represents a gene whose expression level was measured in both the experimental and control groups. Each point's position along the horizontal axis indicates the relative Cy3 signal intensity measured for that gene and reflects, therefore, the gene's expression in rats that were not treated with valproate. A point's position along the vertical axis indicates the relative Cy5 signal intensity measured for the corresponding gene, reflecting the gene's expression in the hippocampus of rats that were treated with valproate. Points lying on or close to the line y=x correspond, therefore, to genes whose expression levels were not significantly altered in rats treated with valproate. By contrast, changes by at least a factor of 1.5 (i.e., θ≧1.5) indicate significant changes in expression in response to the valproate treatment (identified using a Rat Toxicology array from Incyte, Palo Alto, Calif.). These genes are listed in Table 5, below, along with GenBank Accession number for those genes. Again, a cDNA sequence for each gene listed in Table 5 is also provided in the accompanying Sequence Listing, and its sequence identifier is specified in Table 5 along with the GenBank Accession number.

TABLE 5

| | | Accession Number |
|---|---|---|
| Φ | Gene Name | (SEQ ID NO) |
| 3.6 | Rat L1 retrotransposon mlvi2-rn14, 5′UTR | U87602 |
| | and putative RNA binding protein 1 gene, | (SEQ ID NO: 56) |
| | partial cds. | |
| 3.1 | Mouse chromosome 18 clone RP23-16108, | AC020967 |
| | complete sequence. | (SEQ ID NO: 57) |
| 2.8 | Mouse TCR beta locus from bases 250554 to | AE000664 |
| | 501917 (section 2 of 3) of the complete | (SEQ ID NO: 58) |
| | sequence. | |
| 2.7 | Rat Sprague-Dawley UDP-glucuronosyl- | U06273 |
| | transferase (UGT2B12) mRNA, complete | (SEQ ID NO: 59) |
| | cds. | |
| 2.6 | Rat L1 retroposon/pseudogene; 3′ flank. | X61298 |
| | | (SEQ ID NO: 60) |
| 2.5 | Mouse TCR beta locus from bases 250554 to | AE000664 |
| | 501917 (section 2 of 3) of the complete | (SEQ ID NO: 61) |
| | sequence. | |
| 2.5 | Mouse chromosome unknown clone | AC005743 |
| | rp21-657p21 strain 129S6/SvEvTac, | (SEQ ID NO: 62) |
| | complete sequence. | |
| 2.4 | Rat RT1-DOb gene, partial cds. | AB008110 |
| | | (SEQ ID NO: 63) |
| 2.4 | Rat cytochrome P450 IV A1 (CYP4A1) | M57718 |
| | gene, complete cds. | (SEQ ID NO: 64) |
| 2.3 | Rat strain Long Evans shaker myelin basic | AF076337 |
| | protein (Mbp) gene, intron 3, interrupted by | (SEQ ID NO: 65) |
| | ETn retrotransposon. | |
| 2.3 | Rat (LxRN3) LINE 1 repeat element, | M60824 |
| | ORF II. | (SEQ ID NO: 66) |
| 2.3 | Mouse BAC 171m12 MESDC1 (Mesdc1) | AF311213 |
| | and MESDC2 (Mesdc2) genes, complete | (SEQ ID NO: 67) |
| | cds. | |
| 2.2 | Rat mRNA for delta-4-3-ketosteroid 5-beta- | D17309 |
| | reductase, complete cds. | (SEQ ID NO: 68) |
| 2.2 | Rat 3-alpha-hydroxysteroid dehydrogenase | M64393 |
| | (3-alpha-HSD) mRNA, complete cds. | (SEQ ID NO: 69) |
| 2.2 | Mouse LDL receptor member LR3 mRNA, | AF077847 |
| | complete cds. | (SEQ ID NO: 70) |
| 2.2 | Mouse chromosome X clone BAC B22804, | AF121351 |
| | complete sequence. | (SEQ ID NO: 71) |
| 2.1 | Rat mRNA for histamine N-methyltrans- | D10693 |
| | ferase, complete cds. | (SEQ ID NO: 72) |
| 2.1 | Rat long terminal repeat DNA sequence. | L19707 |
| | | (SEQ ID NO: 73) |
| 2.1 | Rat kallikrein-binding protein (RKBP) gene. | M67496 |
| | | (SEQ ID NO: 74) |
| 2.1 | Mouse chromosome 18 clone mgsriii-pl- | AC007665 |
| | 3084 strain RIII Fibroblast cell line C 127, | (SEQ ID NO: 75) |
| | complete sequence. | |
| 2.1 | {clone 6B1, intracisternal A-particle derived | S51653 |
| | LTR fragment} [rats, Genomic, 208 nt]. | (SEQ ID NO: 76) |
| 2 | Rat mRNA for Sulfotransferase K2. | AJ238392 |
| | | (SEQ ID NO: 77) |
| 2 | Rat mRNA for Mx3 protein. | X52713 |
| | | (SEQ ID NO: 78) |
| 2 | Mouse TCR beta locus from bases 250554 to | AE000664 |
| | 501917 (section 2 of 3) of the complete | (SEQ ID NO: 79) |
| | sequence. | |
| 2 | Mouse Naip3 gene, exon 1; neuronal | AF242432 |
| | apoptosis inhibitory protein 1 (Naip 1) and | (SEQ ID NO: 80) |
| | general transcription factor IIH polypeptide 2 | |
| | (Gtf2h2) genes, complete cds. | |
| 1.9 | Rat senescence marker protein 2B gene, | M29302 |
| | exons 1 and 2. | (SEQ ID NO: 81) |
| 1.9 | Rat LEW/N clone D0N544 satellite DNA | U06685 |
| | sequence. | (SEQ ID NO: 82) |
| 1.9 | Rat Eker rat-associated intracisternal-A- | U23776 |
| | particle element. | (SEQ ID NO: 83) |
| 1.9 | Rat (clone pRHx1) hemopexin mRNA, | M62642 |
| | complete cds. | (SEQ ID NO: 84) |
| 1.9 | pol polyprotein | AAC31805 |
| | | (SEQ ID NO: 85) |
| 1.9 | Mouse MHC class III region RD gene, | AF109906 |
| | partial eds; Bf, C2, G9A, NG22, G9, HSP70, | (SEQ ID NO: 86) |
| | HSP70, HSC70t, and smRNP genes, | |
| | complete cds; G7A gene, partial cds; and | |
| | unknown genes. | |
| 1.9 | Mouse chromosome 10, clone RP21-247L16, | AC012302 |
| | complete sequence. | (SEQ ID NO: 87) |
| 1.9 | CGI-86 protein | AAD34081 |
| | | (SEQ ID NO: 88) |
| 1.9 | CGI-83 protein | AAD34078 |
| | | (SEQ ID NO: 89) |
| 1.8 | unnamed protein product | BAB15010 |
| | | (SEQ ID NO: 90) |
| 1.8 | Rat mRNA for Tsx gene. | X99797 |
| | | (SEQ ID NO: 91) |
| 1.8 | Rat mRNA for cdc2 promoter region. | X60767 |
| | | (SEQ ID NO: 92) |
| 1.8 | Rat gene encoding tyrosine aminotransferase. | AJ010709 |
| | | (SEQ ID NO: 93) |
| 1.8 | Rat Eker rat-associated intracisternal-A- | U23776 |
| | particle element. | (SEQ ID NO: 94) |
| 1.8 | Mouse mRNA for plexin 2, complete cds. | D86949 |
| | | (SEQ ID NO: 95) |
| 1.8 | Mouse BAC-146N21 Chromosome X | AC002315 |
| | contains iduronate-2-sulfatase gene; | (SEQ ID NO: 96) |
| | complete sequence. | |
| 1.8 | Mouse (Mus musculus domesticus) X | AF130357 |
| | chromosome region similar to Human | (SEQ ID NO: 97) |
| | DXS963E, complete sequence. | |
| −1.7 | Rat calcincurin A mRNA, complete cds. | M29275 |
| | | (SEQ ID NO: 98) |
| −1.6 | rat myelin basic protein (mbp) gene mrna. | K00512 |
| | | (SEQ ID NO: 99) |
| −1.6 | Rat mRNA for Myelin-associated/Oligoden- | X87900 |
| | drocytic Basic Protein-81. | (SEQ ID NO: 100) |
| −1.6 | Rat mRNA for amyloidogenic glycoprotein | X07648 |
| | (rAG), cognate of Human A4 amyloid | (SEQ ID NO: 101) |
| | precursor protein. | |
| −1.6 | Rat calmodulin mRNA, complete cds. | AF178845 |
| | | (SEQ ID NO: 102) |
| −1.6 | Mouse myelin proteolipid protein mRNA, | M15442 |
| | complete cds. | (SEQ ID NO: 103) |
| −1.5 | Rat thymosin beta-4 mRNA, complete cds. | M34043 |
| | | (SEQ ID NO: 104) |
| −1.5 | Rat stress activated protein kinase alpha I | L27111 |
| | mRNA, complete cds. | (SEQ ID NO: 105) |
| −1.5 | Rat protein kinase C-binding protein NELL2 | U48245 |
| | mRNA, complete cds. | (SEQ ID NO: 106) |
| −1.5 | Rat nuclear-encoded mitochondrial ATP | M25301 |
| | synthase beta-subunit mRNA, 5′ end. | (SEQ ID NO: 107) |
| −1.5 | Rat mRNA for ubiquitin and ribosomal | X81839 |
| | protein S27a. | (SEQ ID NO: 108) |
| −1.5 | Rat mRNA for 14-3-3 protein theta-subtype, | D17614 |
| | complete cds. | (SEQ ID NO: 109) |
| −1.5 | Rat MAL protein gene and mRNA. | X82557 |
| | | (SEQ ID NO: 110) |
| −1.5 | Rat cytosolic branch chain aminotransferase | AF 165887 |
| | BCATc mRNA, partial cds. | (SEQ ID NO: 111) |
| −1.5 | Rat clathrin heavy chain mRNA, complete | J03583 |
| | cds. | (SEQ ID NO: 112) |
| −1.5 | Rat CaMII gene, exon 1 (and joined cds). | X13833 |
| | | (SEQ ID NO: 113) |
| −1.5 | Murine phosphoprotein phosphatase mRNA, | M8 1475 |
| | complete cds. | (SEQ ID NO: 114) |
| −1.5 | Mouse rac1 gene. | X57277 |
| | | (SEQ ID NO: 115) |
| −1.5 | Mouse hippocampal amyloid precursor | U84012 |
| | protein mRNA, complete cds. | (SEQ ID NO: 116) |
| −1.5 | hypothetical protein | CAB70864 |
| | | (SEQ ID NO: 117) |
| −1.5 | {clone E512, estrogen induced gene} [rats, | S74327 |
| | Sprague-Dawley, hypothalamus, mRNA | (SEQ ID NO: 118) |
| | Partial, 259 nt]. | |

[0160] Each of the genes recited in Table 5 above may therefore be used as a signature gene, in the methods of this invention (including the MPHTS methods described infra). Similarly, homologs and/or orthologs of these genes (including human orthologs and homologs) may be readily identified (e.g., by sequence identity and/or hybridization) may also be identified and used in these methods as with the signature genes described in the other examples, supra. Certain genes identified in these in vivo experiments were also identified as signature genes in the in vitro experiments described in Example 1, above. Thus, the in vivo data obtained in these experiments further confirm the utility of those genes in methods and compositions for diagnosing or treating a neuropsychiatric disorder. In particular, these data substantiate the use of those genes in the MPHTS and other screening assays of this invention. Particular genes that were identified as signature genes both in vitro and in vivo include: the calmodulin gene, the calcineurin A gene, and the protein kinase C-binding protein NELL2.

### EXAMPLE 4: IDENTIFICATION OF SIGNATURE GENES BY UNIGENE CLUSTER ANALYSIS

[0161] This example presents results from experiments in which data from prior sequencing experiments were reanalyzed to identify genes and other nucleic acid sequences that are differentially expressed in individuals affected by a neuropsychiatric disorder (e.g., schizophrenia or bipolar disorder) relative to individuals not affected by such a disorder. In particular, these experiments evaluated assemblies of EST clones in the NCBI UniGene database to identify clones that are disproportionately represented in libraries obtained from brain and/or neuronal tissues and cell lines—including tissues and cell lines from individuals having a neuropsychiatric disorder.

[0162] The UniGene database comprises a collection of different assemblies or “clusters” of EST clones that correspond to the same transcript and, optionally, clones which originate from homologous transcripts (for example, clones derived from a homologous or orthologous gene from a different species of organism). See, for example: Schuler, J. Mol. Med. 1997, 75(10):694-698; Schuler et al., Science 1996, 274:540-546; and Boguski & Schuler, Nature Genetics 1995, 10:369-371. See, also, the internet web page URL <http://www.ncbi.nlm.nih.gov/UniGene/> (accessed Sep. 24, 2001) Identities of the libraries from which various transcript specific clones in the database originated were counted to provide an indication of the transcript's abundance in different cell or tissue types from which the libraries were derived.

[0163] Currently, there are approximately 200,000 public human EST clones isolated from clonal libraries derived from cells and/or tissue from the human brain samples. Some of these clones were specifically isolated from particular sub-regions of the human brain. Several of these libraries are related to mental disorders and were prepared from tissues of the Stanley Neuropathology Consortium (described by Torrey et al., Schizophrenia Research 2000, 44:151-155). These libraries are subtractive and, as such, are enriched from transcripts that are present in a first sample (e.g., cells from a schizophrenic individual) but are absent or present in lower abundances in a second sample (e.g., cells from a non-affected individual).

[0164] From the analysis, several genes were identified that exhibit altered expression levels in the hippocampus of schizophrenic individuals relative to normal (i.e., non-schizophrenic) individuals. These genes are listed in Table 6, below. In particular, each gene is listed in Table 6 by its common or popular name, along with its UniGene cluster number. The GenBank Accession number and Gene Identification (GI) number for a representative transcript is also indicated. The cDNA sequence for each of these representative transcripts is further provided here in the accompanying Sequence Listing. Accordingly, the sequence identifier (SEQ ID NO.) from the Sequence Listing is also provided in Table 1, next to the GenBank Accession number.

TABLE 6
Genes with Altered Expression in the Hippocampus
of Schizophrenic Individuals

| | Accession No. | UNIGENE |
|---|---|---|
| Gene Name: | (SEQ ID NO.) | cluster |
| Ribosomal protein L7 | X52967.1 (GI: 36139) | Hs. 153 |
| | (SEQ ID NO: 119) | |
| MORF-related gene 15 | BC002936.1 (GI: 12804158) | Hs. 6353 |
| | (SEQ ID NO: 120) | |
| Lysosomal-associated | X77196.1 (GI: 704462) | Hs. 8262 |
| membrane protein 2 | (SEQ ID NO: 121) | |
| Glutamate dehydrogenase 1 | M37154.1 (GI: 183057) | Hs. 77508 |
| | (SEQ ID NO: 122) | |
| Deleted in split-hand/split- | U41515.1 (GI: 1209723) | Hs. 333495 |
| foot 1 region | (SEQ ID NO: 123) | |
| SH3-domain protein 5 | AB037717.1 (GI: 7242946) | Hs. 108924 |
| (ponsin) | (SEQ ID NO: 124) | |

[0165] Genes were also identified from the analysis which are apparently over represented in the frontal lobes of schizophrenic individuals relative to individuals who are not schizophrenic. These genes are listed below in Table 7. As in Table 6, the genes are listed by their common or popular names, along with the UniGene cluster number and the GenBank Accession number for a representative transcript. The sequence identifier for each representative transcript in the accompanying Sequence Listing is also specified. Table 8 lists genes that were found to be over represented in libraries from normal individuals (i.e., from individuals not affected with a neuropsychiatric disorder) compared to libraries derived from schizophrenic individuals. Thus, these genes are apparently down regulated in individuals having a neuropsychiatric disorder such as schizophrenia. Genes were also identified which are under represented in libraries from bipolar affected individuals relative to non-affected individuals, and these genes are listed in Table 9, below. Finally, Table 10 list genes which are over represented in libraries from schizophrenic individuals relative to individuals affected with bipolar disorder.

TABLE 7
Genes Over Represented in the Frontal Lobe of Schizophrenic
Individuals Relative to Normal (Non-Schizophrenic) Patients

| | Accession No. | UNIGENE |
|---|---|---|
| Gene Name: | (SEQ ID NO.) | cluster |
| PRO1073 protein | AF113016.1 (GI: 6642755) | Hs. 6975 |
| | (SEQ ID NO: 125) | |
| SEC24 (S. cerevisiae) | AJ131245.1 (GI: 3947689) | HS. 7239 |
| related gene family, | (SEQ ID NO: 126) | |
| member B | | |
| Protein phosphatase 1 | BC002697.1 (GI: 12803720) | Hs. 21537 |
| (catalytic subunit, β | (SEQ ID NO: 127) | |
| isoform) | | |
| Signal sequence receptor, γ | NM_007107.1 (GI: 6005883) | Hs. 28707 |
| (translocon-associated | (SEQ ID NO: 128) | |
| protein γ) | | |
| Kelch-like ECH-associated | BC002417.1 (GI: 12803218) | Hs. 57729 |
| protein 1 | (SEQ ID NO: 129) | |
| Myosin X | AF247457.2 (GI: 9910110) | Hs. 61638 |
| | (SEQ ID NO: 130) | |
| Aminoadipate-semialde- | AF136978.1 (GI: 12239341) | Hs. 64595 |
| hyde dehydrogenase-phos- | (SEQ ID NO: 131) | |
| phopantetheinyl transferase | | |
| Glycoprotein M6A | D49958.1 (GI: 1663516) | Hs. 75819 |
| | (SEQ ID NO: 132) | |
| ESTs* | AA193411.1 (GI: 1783011) | Hs. 76728 |
| | (SEQ ID NO: 133) | |
| Synaptophysin-like protein | NM_006754.1 (GI: 5803184) | Hs. 80919 |
| | (SEQ ID NO: 134) | |
| Synaptosomal-associated | D21267.1 (GI: 2373387) | Hs. 84389 |
| protein, 25 kD | (SEQ ID NO: 135) | |
| Ribosomal protein S25 | BC004986.1 (GI: 13436421) | Hs. 289112 |
| | (SEQ ID NO: 136) | |
| CGI43 protein | AF151801.1 (GI: 4929554) | Hs. 289112 |
| | (SEQ ID NO: 137) | |
| ESTs* | R45627.1 (GI: 823839) | HS. 123679 |
| | (SEQ ID NO: 138) | |
| hypothetical protein | NM_018120.1 (GI: 8922478) | Hs. 106768 |
| FLJ20159 | (SEQ ID NO: 139) | |
| Dihydropyrimidinase-like 2 | D78013.1 (GI: 1330239) | Hs. 173381 |
| | (SEQ ID NO: 140) | |
| Splicing factor proline/ | BC004534.1 (GI: 13528665) | Hs. 180610 |
| glutamine rich (poly- | (SEQ ID NO: 141) | |
| pryimidine tract-binding | | |
| protein-associated) | | |
| CpG binding protein | AL136862.1 (GI: 12053228) | Hs. 180933 |
| | (SEQ ID NO: 142) | |
| hypothetical protein | AK001562.1 (GI: 7022889) | Hs. 295909 |
| FLJ10700 | (SEQ ID NO: 143) | |
| Regulator of G-protein | BC000737.1 (GI: 12653888) | Hs. 227571 |
| signaling 4 | (SEQ ID NO: 144) | |
| cDNA DKFZp434I0812 | AL137751.1 (GI: 6808387) | Hs. 263671 |
| | (SEQ ID NO: 145) | |
| Nucleoporin 50 kD | NM_007172.1 (GI: 6005817) | Hs. 271623 |
| | (SEQ ID NO: 146) | |
| Vitiligo-associated protein | AF264714.1 (GI: 8571449) | Hs. 284289 |
| VIT-1 | (SEQ ID NO: 147) | |

*“ESTs” denotes UniGene clusters of EST sequences for which no full length transcript is available.

[0166] TABLE 8
Genes Under Represented in Schizophrenic Individuals
Relative to Non-Schizophrenic Individuals

| | Accession No. | UNIGENE |
|---|---|---|
| Gene Name: | (SEQ ID NO.) | cluster |
| Programmed cell death 7 gene | AF083930 (GI: 4416182) | Hs. 143253 |
| | (SEQ ID NO: 148) | |

[0167] TABLE 9
Genes Under Represented in Bipolar Individuals v. Normal Patients

| | Accession No. | UNIGENE |
|---|---|---|
| Gene Name: | (SEQ ID NO.) | cluster |
| Phosphodiesterase 6B | S41458.1 (GI: 252252) | Hs. 2593 |
| (cGMP-specific, rod, β) | (SEQ ID NO: 149) | |
| Myelin basic protein | BC008749.1 (GI: 14250588) | Hs. 69547 |
| | (SEQ ID NO: 150) | |
| Paternally expressed gene 3 | U90336.1 (GI: 1899243) | Hs. 139033 |
| | (SEQ ID NO: 151) | |

[0168] TABLE 10
Genes Over Represented in
Schizophrenic Patients v. Bipolar Affected Individuals

| | Accession No. | UNIGENE |
|---|---|---|
| Gene Name: | (SEQ ID NO.) | cluster |
| cDNA DKFZp761C1712 | AL157452.1 (GI: 7018467) | Hs. 4774 |
| | (SEQ ID NO: 152) | |
| Meningioma expressed | AF036144.2 (GI: 10835355) | Hs. 5734 |
| antigen 5 (hyaluronidase) | (SEQ ID NO: 153) | |
| ESTs | AW028963.1 (GI: 5887719) | Hs. 25329 |
| | (SEQ ID NO: 154) | |
| Kinesin family member 3A | AF041853.1 (GI: 3851491) | Hs. 43670 |
| | (SEQ ID NO: 155) | |
| Reticulon 4 | BC001035.1 (GI: 12654418) | Hs. 65450 |
| | (SEQ ID NO: 156) | |
| Synaptosomal-associated | D21267.1 (GI: 2373387) | Hs. 84389 |
| protein, 25 kD | (SEQ ID NO: 135) | |
| N-terminal acetyltransferase | AF085355.1 (GI: 5114044) | Hs. 109253 |
| complex ard1subunit | (SEQ ID NO: 157) | |
| KIAA1180 protein | AB033006.1 (GI: 6330240) | Hs. 322430 |
| | (SEQ ID NO: 158) | |
| GW128 protein | AF107406.1 (GI: 5531905) | Hs. 182238 |
| | (SEQ ID NO: 159) | |
| Oxysterol-binding protein | AF274714.1 (GI: 13183326) | Hs. 252716 |
| related protein (ORP1) | (SEQ ID NO: 160) | |
| Proteolipid protein | BC002665.1 (GI: 12803660) | Hs. 1787 |
| | (SEQ ID NO: 161) | |

[0169] Each of the genes listed in these tables (i.e., in Tables 6-10 above) may be used in this invention, e.g., to diagnose and/or treat neuropsychiatric disorders (for instance, bipolar disorder or schizophrenia). For example, the sequences in these tables may be used in diagnostic assays of the invention to identify individuals who either have a neuropsychiatric disease or are at a predispoition for acquiring a neuorpsychiatric disease. Alternatively, the sequences recited in these tables, as well as their homologs, orthologs etc., can be used in screening assays of the invention, such as MPHTS, to identify therapeutic compounds and other treatments that are likely to be useful for treating a neuropsychiatric disorder.

### EXAMPLE 5: ALGORITHMS TO SELECT GENES FOR AN MPHTS ASSAY

[0170] This example describes a preferred algorithm which may be used in connection with the MPHTS methods of this invention. In particular, an exemplary method is described for pooling or compiling expression profile data from a plurality of experiments and selecting a subset of particular genes or other biological constituents which are effective indicators of a therapeutic effect for some disease or disorder. As a result, the number of genes or other cellular constituents that are needed for an effective screening assay may be reduced, e.g., from hundreds (or even thousands) of genes to a smaller number more amenable to high throughput screens. Generally, it will be preferable to reduce the number of genes used in a high throughput assay to a number less than about 100, and more preferably less than about 50. In particularly preferred embodiments the number of genes or other cellular constituents selected for a screening assay will be between about 10 and 30, and more preferably between about 15-20. However, algorithms such as the ones described here may be used to select any desired number of genes for a screening assay. The optimum number of genes may depend on a variety of factors, such as the exact screening platform being used, the number of test compounds to be screened, and the time required to run the assay. A skilled artisan will be able to balance these and other factors involved to select an appropriate number of genes.

[0171] For convenience, both the method and algorithm described in this Example, as well as the other aspects of MPHTS described throughout this specification, are described primarily in terms of measured changes in gene expression levels. That is to say, the invention is described in terms of preferred embodiments where changes in abundances of particular mRNA species in a cell or tissue sample are measured or, alternatively, changes in nucleic acid species that are derived from such mRNA species (e.g., cDNA or cRNA) are measured. Those who are skilled in the relevant art(s) will appreciate, however, that the invention need not be limited to such embodiments. In particular, the methods and algorithms of this invention may be readily implemented using measured abundances or activities of any biological constituent in a cell or organism. These include, but are not limited to, abundances of particular proteins, nucleic acids (e.g., messenger RNA) antibodies, and the like, as well as biological activities such as the activity of a particular enzyme or enzymes.

[0172] Similarly, the methods and algorithms described here are most preferably used to identify genes or other cellular constituents that may be indicative of therapeutic activities in a neuropsychiatric disorder (e.g., bipolar affective disorder, schizophrenia, autism, etc.) or in a neurodegenerative disorder (e.g., Alzheimer's disease or Parkisnon's disease). The description provided here is therefore made primarily in terms of such embodiments and, as a particular example, to identify genes that are indicative of therapeutic benefits for the treatment of bipolar affective disorder (BAD). However, those skilled in the art will recognize that such methods and algorithms can be used in assays for any type of disease or disorder and are not limited to the particular, exemplary, disorders recited here.

[0173] Obtaining Disease and Drug Signatures. In more detail, the algorithms and methods described here combine drug signature and disease signature data, such as those provided in the preceding examples. The algorithm analyzes and compares changes in the expression of each gene within each of the different profiles and, from this analysis, identifies “efficiency genes” for use in a screening assay. Thus, the methods and algorithms of the invention involve, as a first preferred step, a step of obtaining or providing such signature data.

[0174] For instance, in preferred embodiments, disease signatures are obtained or provided which comprise measured expression levels for a plurality of genes in cells or tissues derived from one or more individuals having or diagnosed with a neuropsychiatric disorder. In preferred embodiments, the cells and/or tissue samples are brain cells or tissues derived from a human patient (for example, a post-mortem tissue sample). However, brain and neuronal cells or tissues from other species of organisms may also be used, such as from a mouse, a rat, a primate (e.g., a monkey) or any other species of mammal. Preferably, however, the non-human organism will be one that is a recognized animal model for a neuropsychiatric disorder or other disease of interest; for example, rodents (e.g., rats or mice) exposed to chronic stress or to psychotomimetic drugs. Preferably, the expression levels measured in the human or non-human cells or tissue are compared to expression levels for the same genes in normal (i.e., non-diseased) cells or tissue, such as from brain cells or tissues of normal, healthy individuals who are not affected by a neuropsychiatric disorder. Thus, such disease profiles will preferably comprise measured changes in the expression of particular genes that are associated with a neuropsychiatric disorder (e.g., BAD) compared to each gene's expression level in non-diseased cells or tissue.

[0175] Preferably, drug signatures are also obtained or provided which comprise measured levels for a plurality of genes in cells or tissues that are treated with a known therapeutic compound. Such drug signatures may be obtained or provided by measuring changes in gene expression in vivo (e.g., in an animal model) or in vitro (e.g., in a cell culture assay). For instance, Example 1, infra, describes experiments where a valproate drug signature is obtained by measuring changes in gene expression when rat neuronal cells are contacted with that drug. Lists of candidate valproate drug signature genes that are identified from those experiments are also provided in Tables 1 and 2, supra.

[0176] A second example of drug signature data is provided in Example 3. This example describes experiments where a valproate signature is obtained in vivo, by measuring changes in gene expression in tissue derived from the hippocampus of rats that were exposed to that drug. Candidate drug signature genes that are identified from these in vivo experiments are also listed, supra, in Table 5.

[0177] Preferably, the candidate genes identified in disease and/or drug signature data will be limited to ones that: (1) have a base-line expression level (i.e., their expression in non-diseased and/or untreated cells or tissue) that is above some user-selected threshold; and/or (2) exhibit a change in their expression level (e.g., in response to the disease and/or a drug treatment) that is also above some user-defined minimum. As an example and not by way of limitation, in preferred embodiments signature genes may be selected which have a level of expression in untreated cells and/or tissue that is at least twice the “background” expression level detected on a microarray. The term “background”, when used in this context, generally refers to an average level of signal on a microarray (preferably measured in the absence of any specifically hybridizing RNA, under normal, “base-line” conditions). However, other appropriate definitions for “background” may be appreciated by those skilled in the art and can be used when implementing these methods.

[0178] As another non-limiting example, genes that also have some user-defined minimum level of change in their expression levels (e.g., from control or untreated cells to cells treated with a neuropsychiatric drug) and/or exhibiting changes with a user-selected level of statistical significance (which may be evaluated by the statistical p-value) are selected as candidate genes in a drug or disease signature. In preferred embodiments, the genes analyzed in these methods change their expression level(s) (e.g., from treated to untreated cells and/or from non-diseased to diseased cells) by a factor of at least 1.5 (i.e., by at least 50%) and/or with a p-value that is less than or equal to about 0.05. Optionally, the selected genes may then be prioritized so that those having lower p-values and/or higher levels of expression in control cells are given more priority while less abundant genes are given lower priority.

[0179] It is to be understood that the above “threshold” criteria are provided merely to clarify the description of the invention and that the MPHTS methods described here are not limited to disease signature or drug signature genes selected according to these precise parameters. What is important is that candidate genes be selected which have some absolute level of expression that may be readily and reliably quantitated. Similarly, the changes in the expression level of those candidate genes and the statistical significance of these changes should also be large enough that they may be readily and reliably measured and quantitated. The skilled artisan will be able to select appropriate criteria for selecting such candidate genes, e.g., according to the particular experimental platform used.

[0180] Ranking Candidate Genes. Once a plurality of candidate genes has been obtained or otherwise provided from disease signature and/or drug signature data, the methods and algorithms of this invention may be used to evaluate and compare the relevance of each gene to biological and other functional considerations associated with, in this Example, a neuropsychiatric disease. In a preferred embodiment, genes are selected whose expression patterns satisfy certain objective criteria. Accordingly, each gene is preferably given a score for each of the criteria that it satisfies. That is to say, the score associated with each gene is the sum of the scores for all objective criteria that gene satisfies.

[0181] As an example and not by way of limitation, Table 11 below lists one set of criteria by which candidate genes may be scored and/or ranked for use, e.g., in a high throughput screening assay. For each criterion listed in Table 11, the expression levels for each gene in the disease signature (i.e., in a diseased cell or tissue from a patient) is compared to changes in that gene's expression in at least one drug signature. A score value is associated with each candidate gene, and for each criterion that the gene satisfies, its associated score value is increased by a predetermined amount. For convenience, therefore, exemplary predetermined are also provided in Table 11 for each of the objective criteria.

TABLE 11
ALGORITHM FOR PRIORITIZING MPHTS GENE SELECTION

| | |
|---|---|
| I. | Disease Profile change is in the opposite direction of the Drug |
| | Profile change: |
| | The gene expression changed in disease tissue and also changed in |
| | the opposite direction in response to a therapeutic drug treatment: |

| | |
|---|---|
| (i) | in vitro in human cells (15 points); |
| (ii) | in vivo in an animal model (14 points); or |
| (iii) | in vitro in non-human cells (13 points). |

| | |
|---|---|
| II. | Disease Profile change is in the same direction of the Drug Profile |
| | change: |
| | The gene expression changed in disease tissue and also changed in |
| | the same direction in response to a therapeutic drug treatment: |

| | |
|---|---|
| (i) | in vitro in human cells (12 points); |
| (ii) | in vivo in an animal model (11 points); or |
| (iii) | in vitro in non-human cells (10 points). |

| | |
|---|---|
| III. | Dynamic Relationship: |
| | Change(s) in the gene's expression control a subset of other genes |
| | also associated with the disease or disorder in: |

| | |
|---|---|
| (i) | in vitro in human cells (9 points); |
| (ii) | in vivo in an animal model (8 points); |
| (iii) | in vitro in non-human cells (7 points). |

| | |
|---|---|
| IV. | Static Relationship |
| | The gene is biochemically or functionally related to other proteins |
| | known to be altered in the disease or disorder. |

| | |
|---|---|
| (i) | the gene was found to be changed in human |
| | disease tissue (6 points); |
| (ii) | the gene was found to be changed in human cells |
| | in vitro (5 points); |
| (iii) | the gene was found to be changed in vivo in an |
| | animal model (4 points). |
| (iv) | the gene was found to be changed in vitro in |
| | non-human cells (3 points). |

| | |
|---|---|
| V. | The gene is altered in a particular human brain region of tissue |
| | known to be associated with the disease or disorder. |
| | (4 points). |
| VI. | The altered gene maps to a chromosomal locus associated with the |
| | disease or disorder, e.g., by linkage analysis. |
| | Score = L.O.D. score. |

[0182] It is understood that the exemplary criteria listed in Table 11 above are not exclusive, and may be supplemented with other suitable tests or criteria which may be apparent to those skilled in the art. Likewise, one or more of the criteria listed in Table 11 may be omitted, e.g., where data pertaining to a particular criterion is not readily available. The scores listed for each criterion in Table 11 are also exemplary. The skilled user may readily modify or adjust these values, e.g., according to the quantity or quality of available data pertaining to each individual criterion or depending upon a criterion's relevance to the particular disease or disorder of interest.

[0183] Selecting Efficacy Genes. Once a score has been determined for each candidate gene in the disease and drug profiles, efficacy genes may be readily identified and/or selected by simply identifying and selecting those candidate genes having the highest score. In particular, those genes for which relatively high scores are assigned in the above algorithm may be particularly indicative of the disease or disorder of interest and/or its symptoms. Likewise, such genes are also expected to be particularly indicative of an effective therapy for that disease or disorder. Accordingly, relatively high scoring genes may be used, e.g., in screening assays to identify novel, effective therapies (for instance, to identify new therapeutic compounds).

[0184] In preferred embodiments, the number of genes used in such a screening assay will be less than 100, and more preferably less that 50. High throughput assays that use between about 10-30 and, more preferably, between about 15-30 efficacy genes are particularly preferred. Thus, in preferred embodiments, the number of efficacy genes selected will be less than 100, more preferably less than 50, still more preferably between about 10-50 and even more preferably between about 15-30. However, a smaller number of efficacy genes may be used in many instances, particularly where there is a small number of genes having particularly high scores. In alternative embodiments, therefore, the number of efficacy genes selected may be less than about 20, less than about 10, or five or less. Indeed, a single efficacy gene may be selected and used in many instances.

[0185] Side Effect Genes for MPHTS. The above description of gene selection algorithms for MPHTS is made entirely with respect to the selection of “efficacy genes.” As explained, supra, such genes may be selected by comparing gene expression data in a “disease signature” to expression data from a “drug signature.” The drug signature is preferably one obtained or provided from a known, effective drug that is or may be used to treat the disease of interest. In preferred embodiments, the effective drug will be one that has optimal therapeutic effects while, at the same time, producing minimal side effects in an individual who is treated with that drug.

[0186] When screening to identify new therapeutic compounds, however, it is particularly desirable to identify compounds that show signs of a therapeutic benefit while, at the same time, eliminating compounds that show signs of producing side effects. In particular, some compounds identified in a screening assay may produce side effects so severe that they negate any therapeutic benefits that the compound also produces. It is desirable, therefore, to eliminate such compounds during a high throughput screening assay. This problem may be readily overcome by using the methods and algorithms described here to identify “side effect” genes. In particular, changes in the expression of such side effect genes correlate with, and are therefore indicative of, detrimental side effects of a compound rather than its therapeutic benefits.

[0187] In preferred embodiments, side effect genes may be readily identified by obtaining one or more drug responses for a compound which is known or likely to produce side effects in a patient. For example, the compound may be a known therapeutic drug that produces, in additional to therapeutic benefits, severe side effects in a patient. More preferably, however, the compound is a non-effective drug, which is known or suspected of having a mechanism of action similar to the therapeutic drug's but which does not produce the therapeutic benefits.

[0188] As an example, and not by way of limitation, Table 12, below, lists exemplary compounds that are known to be effective for treating certain neuropsychiatric disorders (schizophrenia, bipolar disease and depression, respectively) as well as non-effective drugs that are known or believed to have a similar mechanism of action and/or share side effects present in efficacious drugs. Drug signature obtained for such non-effective compounds are therefore particularly preferred for identifying “side effect genes” for those disorders.

TABLE 12

| | Effective Drug | Effective Drug | Non-Effective |
|---|---|---|---|
| Neuropsychiatric | (few side | (multiple side | Drug |
| Disorder | effects) | effects) | (similar action) |
| Schizophrenia | Olanzapine | Halperidol | Metoclopramide |
| | Amisulpiride | Clozpine | |
| | Risperidone | | |
| Bipolar disease | Vaiproate | Lithium | Dilantin |
| | Carbamzepine | Electro- | Neurontin |
| | | convulsive | Pentobarbitol |
| | | seizure | |
| Depression | Venlafaxine | Imipramine | Cocaine |
| | Fluoxitine | Tranylcypromine | d-Amphetamine |

[0189] Change in the expression of candidate genes from such “side effect” drug profiles may be simply compared to changes in the genes' expression from the disease profile, e.g., according to the same ranking and scoring methods described supra for efficacy genes. Here, however, those candidate genes having the highest score are expected to be indicative of side effects rather than therapeutic benefits.

[0190] In preferred embodiments, a drug screening assay of the invention will use both efficacy genes and side effect genes. Preferably, the number of side effect genes used is approximately the same as the number of efficacy genes. In preferred embodiments, therefore, the number of side effect genes selected and/or used (e.g., for a screening assay) will be less than 100 and more preferably less than 50. Still more preferably, the number of side effect genes selected and/or used is between about 10-50, and more preferably between about 15-30. In particularly preferred embodiments, about 10-15 efficacy genes and about 10-15 side effect genes are selected and used, e.g., in a screening assay of the invention. As with efficacy genes, however, fewer numbers of side effect genes may also be used, particularly where a small number of side effect genes is identified that have especially high scores. Thus, in some embodiments the number of side effect genes selected and/or used may be less than about 20, less than about 10, or even five or less. Indeed, a single side effect gene may be selected and/or used in some instances.

[0191] Use of efficacy genes in MPHTS. Once efficacy genes for a particular disorder have been identified and/or selected, they may be readily used in a screening assay to identify other promising therapeutic compounds. A candidate therapeutic compound may be identified in such assays by identifying compounds that produce changes in the expression of efficacy genes that are similar to the changes observed in the drug profile, and are in the opposite direction of changes observed in the disease profile. Such changes may be identified, qualitatively (e.g., by a skilled user) but are more preferably identified quantitatively; for example, by assigning a MPHTS “value” for each compound tested in the screening assay.

[0192] As an example, and not by way of limitation, such an MPHTS value may simply be the sum of changes in each efficacy gene's expression observed for a test compound in the screening assay. Preferably, these changes in the efficacy genes' expression levels are normalized as a percentage of the “optimal” change in each gene's expression. As used here, the change in expression of an efficacy gene is said to be “optimal” when it is approximately equal to the change in expression associated with a therapeutic benefit as determined, e.g., from the disease and drug signature profiles. Optionally, the change in each efficacy gene's expression may also be weighted, e.g., by the efficacy gene's score (as determined, e.g., according to Table 11, supra. The calculation of such a value may be easily represented mathematically by the formula:

$$V = {\sum }_{i} {ω}_{i} {E}_{i} \qquad \text{(Equation 1)}$$

[0193] Here, V is the MPHTS “score” calculated for a test compound in an MPHTS assay. E₁ is the measured change in the expression of change i in cells contacted with the test compound compared to the expression in cells that are not contact with a test compound. As noted above, E₁ will preferably be normalized to the “optimal” change associated with a desired therapeutic effect. For example, E₁ may be expressed as the percentage or fraction of optimal change. ω₁ indicates the score for the efficacy gene i. In preferred embodiments, ω₁ is obtained or derived from the score value calculated for gene i, e.g., according to Table 11, above, and is converted to a percentage of the average score value for the efficacy genes that comprise the entire set used for drug screening.

[0194] As noted above, side effect genes may also be used in an MPHTS assay, and candidate compounds may be selected that minimize changes in the expression of those side effect genes. For instance, in preferred embodiments, the MPHTS value calculated for a test compound can be modified; e.g., by subtracting the weighted sum of changes in the expression of each side effect gene. In such embodiments, the MPHTS value may be obtained from a modified form of Equation 1, supra, such as the following:

$$V = {\sum }_{i} {ω}_{i} {E}_{i} - {\sum }_{j} {σ}_{j} {S}_{j} \qquad \text{(Equation 2)}$$

[0195] In Equation 2, above, Sⱼ is the measured change in the expression of side effect gene j, and σⱼ is that side-effect gene's “score” value, which may also be calculated according to Table 11, above. Here, the measured change Sⱼ is preferably expressed as the percentage or fraction of optimal change in that side effect gene in response to some existing drug or therapy. By using quantitative expression such as Equations 1 and 2, supra, a skilled artisan may selected candidate therapeutic compounds in a screening assays by simply selecting ones that have the highest MPHTS value V.

### EXAMPLE 6: IDENTIFICATION OF EFFICACY GENES

[0196] Exemplary Efficacy Genes for BAD. Using the general selection method described in Example 5, above, a set of efficacy genes was identified by comparing disease signatures for bipolar affective disorder (BAD) and drug signature for therapeutic compounds (valproate, carbazamide and lithium) that may be used to treat that disorder. These signatures include, for example, disease and drug signatures that are described in the preceding Examples.

[0197] Each of these genes is listed in Table 13 below, along with their GenBank Accession No. An exemplary cDNA sequence for each of these genes is provided in the accompanying Sequence Listing, and the sequence identifier (SEQ ID NO.) is also provided in Table 13 for each listed gene.

TABLE 13

| | Accession No. |
|---|---|
| Gene Name: | (SEQ ID NO.) |
| Membrane glycoprotein M6 B | D49958.1 (SEQ ID NO: 132) |
| Nidogen | M30269 (SEQ ID NO: 25) |
| Glycogen phosphorylase | NM_002863 (SEQ ID NO: 170) |
| Calcitonin-gene related polypeptide | NM_000728 (SEQ ID NO: 171) |
| (CGRP) | |
| H2A histone family O | NM_003516 (SEQ ID NO: 172) |
| Hypothetical protein | NM_019058 (SEQ ID NO: 173) |
| 5T4 oncofetal trophoblast glycoprotein | NM_006670 (SEQ ID NO: 174) |
| dihydropyrimidinase like 3 (DRP-2) | NM_001387 (SEQ ID NO: 175) |
| June dimerization protein p21 | NM_018664 (SEQ ID NO: 176) |
| Lumican | NM_002345 (SEQ ID NO: 177) |
| KIAA0429 | NM_014751 (SEQ ID NO: 178) |
| Guanosine monophosphate reductase | NM_006877 (SEQ ID NO: 179) |
| CD9 | NM_001769 (SEQ ID NO: 180) |
| Collagen type II alpha | NM_001844 (SEQ ID NO: 181) |
| GAP-43 | M25667 (SEQ ID NO: 162) |
| IGF-BP 5 | NM_000599 (SEQ ID NO: 182) |
| Dual specificity phosphatase 6 | NM_001946 (SEQ ID NO: 183) |
| Ca²⁺ and Voltage dependent | NM_002247 (SEQ ID NO: 184) |
| K⁺ Channel | |
| v-kit Hardy Zuckerman 4 feline | NM_000222 (SEQ ID NO: 185) |
| sarcoma viral oncogen homolog | |
| Silver | BE892678 (SEQ ID NO: 26) |
| Histone Acetyltransferase (HAT) | NM_012330 (SEQ ID NO: 186) |
| Human follistatin gene exon 1-5 | NM_006350 (SEQ ID NO: 187) |

[0198] TABLE 13

| | Accession No. |
|---|---|
| Gene Name: | (SEQ ID NO.) |
| Chromogranin B | Y00064 (SEQ ID NO: 55) |
| Cholinergic receptor, nicotinic, alpha | NM_001272 (SEQ ID NO: 51) |
| polypeptide 3 | |
| HBOX2 | NM_006884 (SEQ ID NO: 188) |
| neurexin 1 | NM_004801 (SEQ ID NO: 189) |
| Cellular repressor of E1A | NM_003851 (SEQ ID NO: 190) |
| Purinergic receptor P2X, 7 | NM_002562 (SEQ ID NO: 191) |
| PTPRF | NM_002840 (SEQ ID NO: 192) |
| Cytochrome b561 | NM_001915 (SEQ ID NO: 193) |
| Mad4 | NM_006454 (SEQ ID NO: 194) |
| AMPA2 | NM_000826 (SEQ ID NO: 195) |
| Dopa decarboxylase | M88700 (SEQ ID NO: 54) |
| Inositol 1,4,5-triphosphate 3-kinase A | X54938 (SEQ ID NO: 196) |
| Doparnine beta hydroxylase | Y00096 (SEQ ID NO: 53) |
| Matrix metalloprotease 3 | U78045 (SEQ ID NO: 197) |

[0199] Exemplary Efficacy Genes for Alzheimer's Disease. As a second example, efficacy genes were also identified for a neurodegenerative disorder and, more specifically, for Alzheimer's disease. Alterations in the brains of Alzheimer's disease patients have been reported in the literature (cited infra) for associated mRNA species of a number of proteins. Such reports have been accrued using publically-accessible data bases. The exemplary search described here identified three preferntially reported genes in Alzheimer's disease brain that encode amyloid precursor protein (APP), presenilin 1 and apolipoprotein E. The activity of each mRNA in human tissue, animal models and cultured cells was summarized for each study. These activities for each gene were entered into Table 14 (infra) according to whether the activity fulfilled the criteria outlined in Table 11, supra.

[0200] The scores of each gene were summed, as were the scores for a hypothetical “ideal” gene; i.e., one that satisfies all of the criteria. The ideal gene produced a maximal algorithm score of 128, whereas the four real gene produced intermediate scores. These results are summarized in Table 14, below. In particular, the Table lists, for each gene, its score for each of the individual criteria specified in Table 11 above. The total score obtained by adding the scores for each individual criterion are also given in Table 14.

TABLE 14
ALGORITHM SCORES FOR GENES
ASSOCIATED WITH ALZHEIMER'S DISEASE

| Ranking | | | | |
|---|---|---|---|---|
| Criterion | APP | Presenilin 1 | Apolipoprotein E | “Ideal” Gene |
| I (i) | 15 | 15 | 15 | 15 |
| I (ii) | | 14 | | 14 |
| I (iii) | 13 | | 13 | 13 |
| II (i) | | | | 12 |
| II (ii) | | | | 11 |
| II (iii) | | | | 10 |
| III (i) | | 9 | | 9 |
| III (ii) | 8 | 8 | 8 | 8 |
| III (iii) | 7 | 7 | | 7 |
| IV (i) | | | | 6 |
| IV (ii) | 4 | 4 | 5 | 5 |
| IV (iii) | 3 | 3 | 4 | 4 |
| IV (iv) | | | 3 | 3 |
| V | 4 | 4 | | 4 |
| VI | 7 | | 3 | 7 |
| TOTAL | 61 | 54 | 41 | 128 |

[0201] These scores allow a prioritization of the three genes by their relevance for diagnostic and screening assays for a neurodegenerative disorder such as Alzheimer's disease. Thus, the gene APP (61) is given highest priority, followed by preseniline 1 (54) and apolipoprotein E (41). The scores also provide an appropriate weighting factor for use, e.g., in an MPHTS screening assay, to balance expression data from each of these three genes. For example, the activity of a test compound on the gene APP may be weighted by a factor of 61 or, more preferably, by a factor of 0.48 (0.48=61/128). Likewise, the genes presenilin 1 and apolipoprotein E may be weighted by factors of 54 and 41, respectively, or (more preferably) by factors of 54/128=0.42 and 41/128=0.32.

[0202] References Considered.

[0203] Eckert et al., Neurobiol Dis., 8(2):331-42, 2001.

[0204] Runz et al., J. Neurosci., 22(5):1679-89, 2002.

[0205] Malin et al., Neurobiol Dis., 4(6):398-409, 1998.

[0206] Morton et al., Neurosci Lett., 319(1):37-40, 2002.

[0207] Martins et al., Neuroscience, 106(3):557-69, 2001.

[0208] Kametani et al. J Neurol Sci., 188(1-2):27-31 2001.

[0209] Pennypacker et al., Brain Res Bull., 48(5):539-43, 1999.

[0210] Scott et al., Genet Epidemiol., 14(3):307-15, 1997.

[0211] Lannfelt et al., Neurosci Lett., 168(1-2):254-6, 1994.

[0212] Yu et al., Am J Hum Genet, 54(4):631-42, 1994.

[0213] Shaw et al., Proc Nati Acad Sci USA, 98(13):7605-10, 2001.

[0214] Yamazaki et al., Biochem Biophys Res Commun., 290(3):1114-22, 2002.

[0215] Harrison et al, J Neurochem., 62(2):635-44, 1994.

[0216] Tanaka et al., Brain Res Mol Brain Res., 15(3-4):303-10, 1992.

[0217] Clark et al., Ann Neurol., 25(4):331-9, 1989.

[0218] Palmert et al., Science, 241(4869):1080-4, 1988.

[0219] Schemchel et al., Alzheimer Dis Assoc Disord., 2(2):96-111, 1988.

[0220] Siest et al., Clin Chem Lab Med., 38(9):841-52, 2000.

[0221] Cedazo-Minguez et al., Neuroscience, 105(3):651-61, 2001.

[0222] Fagan et al., Neurobiol Dis., 9(3):305-18, 2002.

[0223] Gebicke-Haerter et al., Exp Neurol., 95(2):323-35, 1987.

[0224] Brendza et al., Mol Psychiatry, 7(2):132-5, 2002.

[0225] Dashti et al., Biochem Biophys Acta., 618(2):347-58, 1980.

[0226] Ait-Ghezala et al., Neurosci Lett., 325(2):87-90, 2002.

### EXAMPLE 7: EXEMPLARY MPHTS ASSAY

[0227] This example describes and exemplary high throughput screen that uses efficacy genes identified according to an algorithm as described, e.g., in Example 5, supra. In particular, the exemplary high throughput screen demonstrated here uses the following four efficacy genes: Silver (SEQ ID NO:26), Nidogen (SEQ ID NO:25), Chromagranin B (SEQ ID NO:55) and GAP43 (SEQ ID NO:162).

[0228] Cell Cultures. NBFL cells are preferably utilized in these assays. These cells may be cultured and handled according to routine methods that have been previously described (Symes et al., Proc. Natl. Acad. Sci. U.S.A. 1993, 90:572-576). The cells are derived from an adrenal neuroblastoma cell line referred to by Symes et al. (supra) as NB5-S2. However, the NBFL cells used were a sub-population of the NB5-S2 culture cells that adhere to plastic.

[0229] NBFL cells are regularly passaged in DMEM (Mediatech, Cell Grow 10-017-CV) growth medium supplemented with 10% fetal calf serum, 5% horse serum and 5 mM glutamine. Antibiotics in the form of a penicillin-streptomycin solution are also added to the media. Media is exchanged every 2-3 days. Cells are split at approximately 80% confluence. For screening, cells are plated onto 96 well plates using cells that have not exceeded 18 passages. Cell seeding density is preferably in the range of 15,000 to 50,000 cells per well.

[0230] Drug Treatment and Compound Libraries. Commercially available or custom designed libraries of compounds can be used in the MPHTS assays described here. In general, any compound that is at least partially soluble in an aqueous solution can be analyzed by these methods. Examples of such commercially available libraries include the commercially available TOCRIS, SIGMA RBI, Chembidge and Prestwick libraries, to name a few.

[0231] Preferred libraries such as those identified above will typically contain between several hundred to tens of thousands of individual compounds which may be screened. Typically, the compounds are dissolved in DMSO to increase their solubility, and then plated in a 96 well “mother” plate at a concentrations between about 10 and about 30 mM. In preferred embodiments, 80 wells of a 96 well plate contain different compounds. The remaining 16 wells are left empty and used for the addition of control compounds appropriate to the particular screening methodology in dilution plates derived from the original mother plate.

[0232] Generally, the compounds may be applied to cells in micromolar concentrations dissolved in suitable cell culture media. Preferably, the compound treatments are designed to mimic conditions required for a robust drug signature (e.g., the valproate dependent gene changes in NBFL cells described, supra). An exemplary, non-limiting schedule for drug treatment is as follows:

[0233] Day 1: Seed NBFL cells in 96 well plates at a density of 25,000-50,000 cells per well;

[0234] Day 2: Remove media from the wells and replace with serum-free media;

[0235] Day 3: Add test compound(s) in serum-free media to the cells and incubate for approximately 24 hours;

[0236] Day 4: Lyse cells and begin mRNA quantification.

[0237] mRNA Quanitification. Any system capable of measuring the relative abundance of mRNA species in a cell or cells may be used to quantitate the expression of signature genes in a test cell relative to control cells (i.e., cells not exposed to a test compound). Thus, for example, quantitative PCR, northern blotting, and microarray analysis may be used. Two commercially available platforms are particularly preferred. In one embodiment mRNA levels are evaluated using an Xpress™ kit (Tropix, Bedford Mass.) and a Multiplexed Molecular Profiling system available from High Throughput Genomics, Inc. (Tucson, Ariz.). For a description, see U.S. Pat. No. 6,232,066 B1 issued May 15, 2001 to Felder & Kris. Detailed exemplary descriptions of these two platforms are therefore provided, below.

[0238] Xpress Screen™ Platform. In the particular example described here, NBFL cells were seeded in 96 well plates at a density of 25,000 cells per well, using the methods described supra for this example. Twenty-four hours post-seeding, the media was exchanged for serum free media. 24 hours later, serum free media containing valproate at concentrations of 5, 50 or 500 μM was added to the plates. After incubation for a subsequent 24 hours, the cells were lysed and the Tropix (Bedford, MA) Xpress™ assay protocol was followed according to the manufacturer's (Tropix, Bedford Mass.) recommended protocol. Gene expression changes were determined based upon a comparison to untreated cells in the same 96 well plate. The fold change in each of the three genes Silver (SEQ ID NO:26), Nidogen (SEQ ID NO:25) and Chromogranin B (SEQ ID NO:55) is plotted in FIG. 6, for each of the drug concentrations tested.

[0239] Multiplexed Molecular Profiling (MMP). In a particularly preferred embodiment, mRNA levels are assayed using a Multiplexed Molecular Profiling (“MMP”) Assay, available from High Throughput Genomics, Inc. (Tucson, Ariz.). This assay allows a user to simultaneously measure mRNA levels for up to 16 different genes in a single well of a 96 well plate. For a description, see U.S. Pat. No. 6,232,066 B1 issued May 15, 2001 to Felder & Kris. To validate the MMP platform, NBFL cells were treated with several concentrations of valproate, and gene expression levels relative to untreated cells were measured.

[0240] In more detail, NBFL cells were seeded in 96 well plates at a density of 50,000 cells per well, using the methods described supra in this example. Twenty-four hours post-seeding, the media was exchanged for serum free media. Twenty-four hours after that, serum free media containing 5, 25, 50, 250 or 500 μM valproate was added to test wells of the microtiter plate. The cells were incubated for twenty-four hours and then lysed. mRNA was recovered and measured on the MMP platform following the manufacturer's recommended protocol (High Throughput Genomics, Inc., Tucson Ariz.). In particular, the expression of each of the four genes Silver (SEQ ID NO:26), Nidogen (SEQ ID NO:25), Chromogranin B (SEQ ID NO:55) and GAP43 (SEQ ID NO:162) was measured in cells treated with each of the five different concentrations of valproate and in the untreated cells. Changes in the expression of a fifth gene, Actin were also measured in both valproate treated and untreated cells, as a control. The fold change measured in the expression of each gene in plotted in FIG. 7 as a function of the valproate concentration.

[0241] These results substantiate that each of the four genes Silver (SEQ ID NO:26), Nidogen (SEQ ID NO:25), Chromogranin B (SEQ ID NO:55) and GAP43 (SEQ ID NO: 162) is a useful efficacy gene and may be feasibly used in a high throughput screening assay to identify novel therapeutic compounds, e.g., for treating a neuropsychiatric disorder such as BAD. In particular, these data demonstrate the feasibility of using these and other efficacy genes in a high throughput assay that employs standard commercial platforms, such as the Xpress™ screen (Tropix, Bedford Mass.) or the MMP (High Throughput Genomics, Tucson Ariz.) platforms demonstrated here.

[0242] Compound libraries of test compounds where also purchased from commercial vendors and screened on a HTG Multiplexed Molecular Profiling platform using the same efficacy genes described above; i.e., Silver (SEQ ID NO:26), Nidogen (SEQ ID NO:25), Chromogranin B (SEQ ID NO:55) and GAP43 (SEQ ID NO:162). The change in the expression of each efficacy gene was measured in NBFL cells contacted with each of the test compounds (50 μM), and thest changes were compared to those induced by 500 μM valproate (described above).

[0243] Briefly, the NBFL cells were cultured in 96 well microtitre plates in a culture medium containing FBS. At the start of the experiment, the medium was exchanged for serum free media and cultures were maintained for 24 hours in a cell incubator, under 95% O₂, 5% CO₂ and at a temperature of 37° C. After 24 hours, the media was removed and exchanged for additional fresh medium containing the test compounds at a final concentration of 50 μM on the cells. The cells were incubated for an additional 24 hours under the conditions recited above, and were then lysed and passed through the MPHTS screen.

[0244] Gene expression was evaluated by quantitation of a chemiluminescent signal, using an Omix imager CCD camera system. To control for fluctations that may be due to variations in cell numbers, the raw measurements were normalized within a well to measured expression levels of a control gene, GAPDH. Expression levels of a second gene, B-actin, were also measured for quality control purposes and to confirm that the compounds are not affecting growth and/or differentiation of cells during the incubation.

[0245] The results are plotted in FIGS. 7A-7D. In particular, these plots indicate the level of change for each of the four efficacy genes, Nidogen (FIG. 7A), Silver (FIG. 7B), Chromogranin B (FIG. 7C) and GAP43 (FIG. 7D) relative to the control gene GAPDH.

[0246] These data show that, in a plate of compounds screened at 50 μM, it is possible to distinguish several compounds having activity equivalent to that of valproate at the higher concentration. E.g., compare compounds in wells A10 (starred) and D10 on the horizontal axis in FIG. 7A-7D to the Valproate values (indicated by the dark grey horizontal line in each figure).

[0247] One compound in particular (referred to here a G05) exhibited dramatic improvement in the gene expression profile compared with valproate. Another compound, (referred to here as D06) also mimicked the effect of valproate on expression of all efficacy genes except Chromogranin B.

### REFERENCES CITED

[0248] Numerous references, including patents, patent applications and various publications, are cited and discussed in the description of this invention. The citation and/or discussion of such references is provided only to clarify the description of the invention and is not an admission that any such reference is “prior art” to the invention described herein. All references cited or discussed in this specification are incorporated herein, by reference, in their entirety and to the same extent as if each reference was individually incorporated by reference.

What is claimed is:

1. A method of selecting one or more efficacy genes that are indicative of an effective therapy for treating a disease or disorder of interest, which method comprises:
(a) identifying a plurality of disease signature genes, each of said disease signature genes being differentially expressed in a cell or tissue from an individual affected by the disease or disorder of interest compared to expression in a cell or tissue from an individual not affected by the disease or disorder of interest;
(b) identifying a plurality of drug signature genes for a given therapeutic compound, each of said drug signature genes being differentially expressed in a cell or tissue contacted with the given therapeutic compound for treating the disease or disorder of interest compared to expression in a cell or tissue not contacted with the given therapeutic compound;
(c) obtaining a score value for each of the disease signature and drug signature genes, the score value for each of said drug signature and disease signature genes being a function of each gene's differential expression in the disease signature compared to its differential expression in the drug signature; and
(d) selecting disease signature and drug signature genes having the highest score value,
wherein disease signature and drug signature genes having the highest score value are indicative of a successful drug for treating the disease or disorder of interest.

2. A method according to claim 1 wherein the disease or disorder of interest is a neuropsychiatric disorder.

3. A method according to claim 2 in which the neuropsychiatric disorder is selected from the group consisting of bipolar affective disorder, schizophrenia and autism.

4. A method according to claim 1 wherein the disease or disorder of interest is a neurodegenerative disorder.

5. A method according to claim 4 in which the neurodegenerative disorder is selected from the group consisting of Alzheimer's Disease and Parkinson's Disease.

6. A method according to claim 1 in which the given therapeutic compound is selected from the group consisting of valproate, buspirone, lithium, carbamazapine, clozapine, olanzapine, heloperidol, secretin, vasoactive intestinal polypeptide (VIP), amisulpiride, risperidone, venlafaxine and fluoxitine.

7. A method according to claim 6 in which the given therapeutic compound is valproate and the disease signature gene comprises one or more nucleic acids that hybridize to a nucleic acid selected from the group consisting of SEQ ID NOS:1-12 or a complement thereof.

8. A method according to claim 6 in which the given therapeutic compound is valproate and the disease signature gene comprises one or more nucleic acids that hybridize to a nucleic acid selected from the group consisting of SEQ ID NOS:25-55 or a complement thereof.

9. A method according to claim 6 in which the given therapeutic compound is valproate and the disease signature gene comprises one or more nucleic acids that hybridize to a nucleic acid selected from the group consisting of SEQ ID NOS:56-118 or a complement thereof.

10. A method according to claim 6 in which the given therapeutic compound is VIP and the disease signature gene comprises one or more nucleic acids that hybridize to a nucleic acid selected from the group consisting of SEQ ID NOS:163-169 or a complement thereof.

11. A method according to claim 3 in which the neuropsychiatric disorder is schizophrenia and the disease signature genes comprise one or more nucleic acids that hybridize to a nucleic acid selected from the group consisting of SEQ ID NOS:1-24 or a complement thereof.

12. A method according to claim 3 in which the neuropsychiatric disorder is schizophrenia and the disease signature genes comprise one or more nucleic acids that hybridize to a nucleic acid selected from the group consisting of SEQ ID NOS:119-148.

13. A method according to claim 3 in which the neuropsychiatric disorder is bipolar affective disorder and the disease signature genes comprise one or more nucleic acids that hybridize to a nucleic acid selected from the group consisting of SEQ ID NOS:149-161 and 135.

14. A method according to claim 1, further comprising the selection of one or more side effect genes that are indicative of side effects in a treatment for the disease or disorder of interest, said side effect genes being differentially expressed in a cell or tissue contacted with a compound that produces side effects in an individual compared to expression in a cell or tissue not contacted with the compound.

15. A method according to claim 14 in which the side effect genes are differentially expressed in neuronal cells.

16. A method according to claim 14 in which the side effect genes are differentially expressed in peripheral cells.

17. A method according to claim 12 wherein the compound that produces the side effects is a non-effective drug having a mechanism of action that is similar to the mechanism of action for the given therapeutic compound.

18. A method according to claim 1 in which each of the drug signature genes is differentially expressed in a cell or tissue contacted in vitro with the given therapeutic compound.

19. A method according to claim 1 in which each of the drug signature genes is differentially expressed in a cell or tissue contacted in vivo with the given therapeutic compound.

20. A method for identifying a compound to treat a disease or disorder of interest, which method comprises:
(a) contacting a cell with a test compound;
(b) determining expression, by the cell, of one or more efficacy genes selected by a method according to claim 1; and
(c) comparing the determined expression of the one or more efficacy genes to expression in a cell not contacted with the test compound,
wherein changes in the expression of the one or more efficacy genes consistent with a therapeutic effect indicate that the test compound is useful for treating the disease or disorder of interest.

21. A method according to claim 20, wherein changes in expression of efficacy genes which are similar to changes observed in the drug profile indicate that the test compound is useful for treating the disease or disorder of interest.

22. A method according to claim 20, wherein changes in expression of efficacy genes that are in the opposite direction of changes observed in the disease profile indicate that the test compound is useful for treating the disease or disorder of interest.

23. A method according to claim 20 in which the disease or disorder of interest is a neuropsychiatric disorder.

24. A method according to claim 23 in which the neuropsychiatric disorder is selected from the group consisting of bipolar affective disorder (BAD), schizophrenia and autism.

25. A method according to claim 20, in which changes in expression of efficacy genes are evaluated from a value (V) comprising the sum of each efficacy gene's change in expression normalized to the optimal change associated with that gene in the disease or drug signature.

26. A method according to claim 25, in which said value (V) is determined from the normalized change (E₁) in expression of each efficacy gene (i) weighted by the score value (ω₁) according to the relation the relation:
$$V = \sum {ω}_{i} {E}_{i} .$$

27. A method according to claim 20 which further comprises steps of:
(a) determining expression by the cell of one or more side effect genes that are indicative of a side effect in a treatment for the disease or disorder; and
(b) comparing the determined expression of the one or more side effect genes to expression in a cell not contacted with the test compound.

28. A method according to claim 27, in which changes in expression of efficacy genes and side effect genes are evaluated from a value (V) that comprises the sum of each efficacy gene's change in expression normalized to the optimal change associated with each efficacy gene in the disease or drug signature, modified by subtracting the weighted sum of changes in the expression of each side effect gene.

29. A method for identifying a compound to treat a disease or disorder of interest, which method comprises:
(a) contacting a cell with a test compound;
(b) determining expression, by the cell, of one or more efficacy genes set forth in SEQ ID NOS:26-26, 51, 53-55, 132, 162 and 170-197; and
(c) comparing the determined expression of the one or more efficacy genes to expression in a cell not contacted with the test compound,
wherein changes in the expression of the one or more efficacy genes consistent with a therapeutic effect indicate that the test compound is useful for treating the disease or disorder of interest.

30. A method according to claim 29 wherein the disease or disorder is a neuropsychiatric disorder.

31. A method according to claim 30 in which the neuropsychiatric disorder is selected from the group consisting of bipolar affective disorder (BAD), schizophrenia and autism.

The application's sequence listing, which the Patent Office published only in electronic form, follows.

SEQUENCE LISTING (197 sequences)

SEQ ID NO: 1 - DNA, 2468 bp, Rattus norvegicus
cagaagccagaccatccaaggttgactggccacttggagcggaatcaggagacattcccaactcagggagactgaggtgagggccctagctcgcccacttgctggacaagatgatattccttaccaccctgcctctgttttggataatgatttcagcttctcgaggggggcactggggtgcctggatgccctcgtccatctcagccttcgagggcacgtgtgtctccatcccctgccgtttcgacttcccggatgagctcagaccggctgtggtacatggcgtctggtatttcaacagtccctaccccaagaactacccgccagtggtcttcaagtcccgcacacaagtggtccacgagagcttccagggccgtagccgcctgttgggagacctgggcctacgaaactgcaccctgcttctcagcacgctgagccctgagctgggagggaaatactatttccgaggtgacctgggcggctacaaccagtacaccttctcggagcacagcgtcctggacatcatcaacacccccaacatcgtggtgcccccagaagtggtggcaggaacggaagtagaggtcagctgcatggtgccggacaactgcccagagctgcgccctgagctgagctggctgggccacgaggggctaggggagcccactgttctgggtcggctgcgggaggatgaaggcacctgggtgcaggtgtcactgctacacttcgtgcctactagagaggccaacggccaccgtctgggctgtcaggctgccttccccaacaccaccttgcagttcgagggttacgccagtctggacgtcaagtaccccccggtgattgtggagatgaattcctctgtggaggccattgagggctcccatgtcagcctgctctgtggggctgacagcaacccgccaccgctgctgacttggatgcgggatgggatggtgttgagggaggcagttgctgagagcctgtacctggatctggaggaggtgaccccagcagaggacggcatctatgcttgcctggcagagaatgcctatggccaggacaaccgcacggtggagctgagcgtcatgtatgcaccttggaagcccacagtgaatgggacggtggtggcggtagagggggagacagtctccatcctgtgttccacacagagcaacccggaccctattctcaccatcttcaaggagaagcagatcctggccacggtcatctatgagagtcagctgcagctggaactccctgcagtgacgcccgaggacgatggggagtactggtgtgtagctgagaaccagtatggccagagagccaccgccttcaacctgtctgtggagtttgctcccataatccttctggaatcgcactgtgcagcggccagagacaccgtgcagtgcctgtgtgtggtaaaatccaacccggaaccctccgtggcctttgagctgccttcccgcaacgtgactgtgaacgagacagagagggagtttgtgtactcagagcgcagcggcctcctgctcaccagcatcctcacgctccggggtcaggcccaagccccaccccgcgtcatttgtacctccaggaacctctacggcacccagagcctcgagctgcctttccagggagcacaccgactgatgtgggccaaaatcggccctgtgggtgctgtggtcgcctttgccatcctgattgccattgtctgctacatcacccagacaagaagaaaaaagaacgtcacagagagccccagcttctcagcgggagacaaccctcatgtcctgtacagccccgaattccgaatctctggagcacctgataagtatgagtccagagaggtctctacccgggattgtcactgagagccccaggagagtgagaagcgcctggggtccgagaggaggctgctgggccttaggggggaacccccagaactggacctcagttattcccactcagacctggggaaacgacccaccaaggacagctacaccctgacagaggagctggctgagtacgcagaaatccgagtcaagtgaggaagctgggggctggccctgtggctcaccccccatcaggaccctcgcttggcccccactggccgtgggctccctttctcttgagagtggtaggggtgggggcgggaaggggcggggcaggaaacagtgaggtcttaggggcccggcctcccctccttcccggctgctcctctctgccaacatcctgcacctatgttacagctccctctcccctccttttaacctcagctgttgagaggggtgctctgtctgtccatgttatttattgttatcctggtctcctgtccccttacccggccccaggacctgtacaaaagggacatgaaataaatgtcctaatgacaagtgccagtctagacccatcctttggaggaaaggggcatattagtaatacttttctcgttgctgtaacaaaatactggacaaaaacac

SEQ ID NO: 2 - DNA, 2019 bp, Rattus norvegicus
cggctgactgggagcagcaggcacttgctgcccttgcatgccctgccaccagggtgttctctctgaggggtagctgaaagccggagagtaagaggtttgatagcttcagtgagggtccttctactcatacaaccctgctgttgaagatacggaaggaccagctgggaggaagaaaagctaccattcctgccgggagctgggaaaagcgcccacgcattcaagggtcgttcaagttaggctcggggattctgaactgacatccggtccccctctggagaactaggccaaagacaagggtttggtgcttgtgggctggctttgaggagcccgggctaacatctcctcctcccttctcacatagagcacaagctttgcccgaaaaagccacacattcctgcccaagatcttcttcagaaaaatgtcatcctcaggagctaaggacaagccagagctgcagttccctttccttcaagatgaggacacggtggctacgctgcacgagtgcaagacgctgttcatcctgcgtggcctgccgggcagcggcaagtccactctggctcggctcaatccgtggagaagtaccacaacggcaccaagatggtgtctgctgatgcttacaagatcattcctggctctcgggcagacttctccgagggagtacaagcgtctggacgaggacctggctggcatactgccgcgggacatcagggttcttgtgctcgatgacaccaaccatgagcgggaacggctggaccagttttttgaaatggcagaccagtaccagtaccaggtggtgctggtggagcccaagacggcgtggcgactagactgtgcccagctcaaggagaagaaccaatggcagctgctcgctcgcatcgatgacctgaagaagctgaagcccgggctggagaaggacttcctgccactttactttggctggttcctgaccaaaaagagttccgagaccctccgaaaagacagccggccaggatcatttcagtggaagctgggaaatcacaaggctttaagaaagagcttcgacacttcactttacatggggatgaacccaaggagaagcttgcctgtcagctactttggcaagagacctccaggcgtgctgcactgtacaaccaaattctgtgactacgggaaggccaccggggcagaagaatatgcccaacaggatgtggtgaggagatcttacggcaaggccttcaaactgtccatctctgccctctttgtgacacccaagacagctggggcccaggtggtgcttaatgagcaggagctgcagttgtggccaagtgacctggacaagccctcatcctccgagagcctgcccccagggagccgagctcacgtcaccctaggctgtgcagccgacgtgcagccagtgcagacaggccttgacctcttagagattttacagcaggtgaaggggggcagccaaggtgaggaggtgggtgagctcccccggggcaagctctattccttgggcaaagggcgttggatgctgagcttggcgaagaagatggaagtcaaggccatcttcacgggtactatgggaagggcaaacctgtaccgtacacggcagccgaagggggttgccatgcagatctgcaccatcatctagggttcacgccactgtgccaccgctgtggacacagcaacatgccttccacttgattttttaagattttttttttttactcaaagctaatctacctataacttttagaagtctgttaaaataaccatcagttccttcacccaccctcttccccttaacactcagctaacacaggcagtggggcagaggaagacaccattcaggaacctggaccagaggtggtaattaaagggctgggtcattggccttggagcggccacctagatgcacccaggaccttgttgaccctcccttagccgctgcccatgcagagctgggcacacacacctcaagccaccacatcatgcaagggacaaatgctactggcacagaaaacagtgtagctttaa

SEQ ID NO: 3 - DNA, 1603 bp, Rattus norvegicus
gaattcatttatattttgcataaaaccctgatgaggtttaccattgaactcctttcctgctcctttccctgagtatattaaacttctgatcaatgcttggaagcttaggggaaagagacgcataggttattgcataatgtttcttaaatccttaagcttaagagtcctcagaaatcctagagaacctagtatctttgagagctctttcataaaaacctaaggcaagtgtgatttgaatccttgaggtgcgtgtaaaacaaagcctgtttgattggtttgtagaataacattgacttgagaaaggaaatacatacaaagctcatttcagtgatttttatctgtttagtttgtgttgtttaaagtagggtggtgtgttttatactgtagcctaaggctagcctgaaactcactatgtaattcaggctggtcttgaatttgcccctaatctcctttccttcctttcttgagtcctggaattacagagcttctccagcctaccccttgaatgcctgggatgttcggggtcagagacaaggtagcatttgggtagtgacctaagtctgtaatccctgtatagggaggctgagaaggaaagagctcatcctccaggtcagggagggtgacacatcaaaactatgtcactaaaggagaagaatgactggtgaagtgtctctgaagattgatttgaattttaattctcccaaccgcataaaggtcttagcacgtaacgaatcactcgaagagttatccacccgttgagcttaccttttttttttgtccctcttttctccacacaggttgaaaagaatgatgaggaccaaaagattgaacaagatggtgtcaaaccggaggataaggctcataaggctgcaaccaaaattcaggctagcttccgtggacacataacaaggaaaaagctcaaagacgagaagaagggtgatgcaccagctgctgaggccgaggccaaggagaaggatgatgctcccgttgctgatggtgtggagaagaaggagggagatggctctgctactaccgatgcagccccagccaccagccctaaggctgaggagcccagcaaggcaggagatgcaccttctgaggagaagaagggcgaaggggatgcggccccttcagaggaaaaggccggctcagctgagacagaaagtgctgctaaagctaccactgataactcgccgtcctccaaggccgaagatggcccagccaaggaggagcctaaacaagccgatgtgcctgctgctgtcactgatgctgctgccaccacccctgctgcagaggatgctgccaaggcagcgcagcctccaacggagactgcagaaagcagccaagctgaggaggagaaaggtgagtaccacggtgagggtggggccacggcgggacgcaccagggatgttaaacctagagccagaccacctacactgtccagagggaactgtctagagagcgtagaccacaaatcacaaaagttatggtgaatcccccccaaatctacaagcccgagagaaaactcagaaagaattacatggcgctagtactggagaatcagacaattatcttaattggattgatataaacagtcaagctt

SEQ ID NO: 4 - DNA, 1123 bp, Rattus norvegicus
cattttccagacgccggccgcatccctcctgtcgtcgaagccccagccgcctgcagaccatggccagcaccgatctgccaatcatatagcaggcctatccccaggccctgccagtgatcactatgtcttatctgttccttgaggatctgtcttctgagaagaaaactccccattgtccatcaaaataaggataaacactgccccagccgcctccagcaccatggccagcaccgtatctgcctacaaggagaagatgaaggagctatctgtgctgtcgctcatctgttcctgcttctactcgcagcctcacccgaacaccatctaccagtatggggatatggaagtgaagcagctggataagcgggcctctggccagagcttcgaggtcatcctcaagtctccttctgacctatctccagagagccctgtgctctcttctcctcccaagaggaaggatgcttccttggaagagctgcagaagcggctggaggcagctgaggagcggaggaagactcaggaggctcaggtgctgaagcagctggcagagcgacgtgagcatgagcgggaggtgctgcacaaggcgctggaagaaaacaataactttagccccctggcggaggagaagctcaactacaagatggagctgagcaaggagattcgcgaggcgcacctggcggcgctgcgcgagcggctgcgtgagaaggaactgcacgctgctgaggtgcgcaggaacaaggagcagcgggaggaaatgtctggctaaagagcactggaccaagcagcaacaagaacattttccggttttgtttttgttttcaattctgtctagatgcgaattttgtgcctgctcctatctgctcccctgtacccccagcttcctgcttttctcccacattctgaactgtccagtccttgtgatgtgtctgaccttggactcttcctgaaggagctccctaggcaggaatatggtcccctattcagacactaggccaggtgtgactggggctctcttagtggccctcttagtggatgtgttggcaaccttaataaatctagtggcagtggcaaaaaaaaaaaaaaaaaaaaaaaaaaaaaaaaaaaaaaaaaaaaaaaaaaaaaaaaa

SEQ ID NO: 5 - DNA, 3513 bp, Rattus norvegicus
gtgcagccaccctcgcctgcctcgctcttccttccttcgctcgcaccatggctgatcagctgactgaagaacagattgctgaattcaaggaagctttctccctatttgataaagatggggacggcaccatcacaacaaaggagctggggactgtcatgcggtcactgggtcagaacccaacagaggctgaactgcaggatatgatcaacgaggtggatgccgacgggaatggcaccattgacttcccagagttcttgactatgatggctagaaaaatgaaagacacagatagcgaagaagaaatccgtgaggcattccgagtctttgacaaggatggcaatggctacatcagtgcggcagaactgcgccacgtcatgacaaacctcggggaaaagctaacagatgaagaagtagacgaaatgatcagagaagcagatattgatggagacggacaggtcaactatgaagaattcgtacagatgatgactgcaaaatgaagacctactttcaactactttccccctctagaagaatcaaattgaaatcttttacttacctcttacaaaaaaaaaaaagaaaaaagaaaaaagttcatttcttcattctgtttgtatctagcaaaactgaatgtcaaaagtaccttctgtccacacacaaaatctgcatgtattggttggtggtcctgccccctaaagatcaagccccctacatgagttttacagtataaatactcgtactaccttataaggaagcacttagtggactccttcaagttccatttgctaatgattaacacactgtctgggctggccagtttctcatgcatgcagcttggtgattgagcacagtcaggcctttgtattaaaactgaaaaatggaaaaaacaaattcaaactctcagatggcttctagttcaatctgttcagataaatgtcagcagccagtttaccgcaaacaaacatttaaaattggtttacctcaggatgatgtgcaggaaacgggtgaaggctaaactttgagacacagccctagatgtaggacagtcctcttcaagtgccccaatcccatggtgacagtgacaccctggtggcgagcccgagtgtgatggttcaccgctgtgcacattgcattggagtgaagtgaacaaggctgtcaccaaatcacacacgttttaataagaaatgtttactaagggagcatctttggactctctgttttaaaaccttgtgaaccatgactcggagccagcagagtaggctgtgtctgtggacttgagcacaccatcaacattgctgttcaggaaattataatttacgtccattccaagttgtaaatgctagtcttttattttttttttccaataaaaagaccattaacttaaaagtggtgttaaatggtttgtaaagctgagcttggaagggggacaaggccgttggaggggaggtcagcggacatagaaacacccaacgtccagtacaagctggatttcccgcccaggttctctagcatcaacccctgaaaccagacagattctttgtcatctacgaccatgtaagtctagttattcaaatctgcgcgcatgcgcaaatcatggtgaattgatacttggagtagagccctagtgaaggaaggcctcaagcattcagtaaggatgtcttggctgtgctgctgctgacctgttgaagtacatgaggccatctgtgcaggagacatgatttagtgtgtgtgtaatcctatactcactgtgtatggtgaagcaggccagtcaaagacactacctttgattcagtttaatttatggttatacttaactttagccttttttattatttaagttcactgctttttctccccctaagtagagttaatgcttaacactgtcttgaaagcaaaacaatatcccagaatgaattttgtgtcttaattacgaacctgtaaccaaaacgtacatgtgctggtactggtcccttagcccaaggcactgggctatttaaaaagtcccccttaagaagtgtgttgcatttaaaacaagggccttgtacatttttcagggtgttaactggctgtatctgattaataaggagtgttggcttccaaattcgggggtggcagggagctggcaggcttgtagcaaggcaatgagaagcccttggcaaccacacgggtgcactcggggtaacctacagacccctggttgctccttctcctgctccctgtctttctggcgttttgtagctccttagaattttttttctttctgccaggaggataggtcagagcagtagagaggaagacattgcctgagcgcttctgctcatctttggactgggtggttggcagacaggtcgatgggtggtaaattgacttcagtatcggactcagtaggtattcccttttggtagagaggactgagggctccaggtgtgaagtgaatggccgtggatatgttgtgtaagaggattaagtcgcccagtcgatgacccagtctcaggcttgtggtctgttacctcttggtagtttcaaagggggtcggaggtggctttttaaaaacaatttaccccctatctttaaccatttaccaagtctgtagaagctgggtagacaatattttagcagctccgtagcctgtcctaaaaggttaccttctaaacaggattcttgtgtggccagggatcctgcatgggaactggaaacccctaacccccggggggtgggaagcaggagtttggaactgtaggaggcagagtccccccacctcctcagccttctggcatccaggggcacaagcagcccagggcttggtgttggcagtctgagttcgtgaggtagaaagagtggggtgtcaaggcagtacccctgaagttggatagtactttcctgtaaactgtccctcacttataactactctataaatatatgcatatatttatataaatatatatatataagtgactggttagctggcatcctgctttagcctgagacttgccctaagaaactgctgagcccttggtaaacgtctacacagtaagtttttctgtctgttggggggagctgttgaacaaggcagacatcttgatagttcagatgggctttaatgtactgttgccagggaaggctttttctggttttttgacaaatttttagcacacttcaattggtgtctcgagcaactttaacacattgaagatgaggtattgtacatatttttatattctctttataagtgcatgtctccaacttgtaaccaatattgtacggaatggctgtccagtaggcctagtgtttctgtcacacgagagggatagcatgtaccattcacccctcagcatcctgggagcttcttcttgaatgaagactgtaaatttggtcaagtcaactcttagttcggtttccttaccatttgaatgattgactgtgtgtcctgcgtgtatttctcttttggcagcgaccagagttacactgatgtgtctcaaccgacccactcggctggcaaccacctatttattttct

SEQ ID NO: 6 - DNA, 2337 bp, Rattus norvegicus
cgggaggaggagtgaaggcggcggcggcggaggagggacgcgcggagccggcagtaactttcgagccagcccagagcccggagctccagccgagcggtttgcagcgcggcggcgcggcgctgagtgtctggcccgccggtgcggtcggggtgtgcagtcggacgggaccagcagcgcgtcgctgtccccccctcccggtgactggagatgtccgagcccaaggcgattgatcccaagttgtcgactacggacagggtggtgaaagccgttccatttccgccaagtcaccggctgacagcaaaggaagtgtttgataacgatgggaagcctcgtgtggatatcttaaaagcacatctcatgaaggaaggcaggctggaagaaagtgtcgcgttgagaataataacagagggtgcttcgattctccgacaggaaaaaaacttgctggatattgatgccccagtcacagtttgcggggacatccatggacaattctttgacttgatgaagctctttgaagtgggaggatctcctgccaacactcgctacctcttcttaggggactatgttgacagagggtacttcagtatcgaatgtgtgctgtatttgtgggccttgaaaattctttaccccaaaacactgtttttacttcgtggaaaccatgaatgtaggcacctaacagagtatttcacgtttaaacaagaatgtaaaataaagtattcagaacgcgtttatgacgcctgtatggatgccttcgactgccttcccctggctgcgctgatgaaccaacaattcctgtgtgtacacggtggtttgtctccagagattaacactctagatgacatcagaaaattagaccgattcaaagaaccacctgcttatgggcctatgtgtgacatcttgtggtcagaccccctggaggactttggaaatgagaagactcaggaacatttcactcacaacacagtcaggggttgttcgtacttctacagttacccggctgtatgtgacttcctgcagcacaataatttgttgtccatactccgagcccacgaagcccaggacgcagggtaccgcatgtacaggaaaagccaaacaactggcttcccgtctctaattacgatcttctcggcaccaaattacttagatgtgtacaataataaagctgcagtgttgaagtacgagaacaacgtgatgaacatcaggcagttcaactgctccccccatccgtactggctcccaaatttcatggatgttttcacctggtcgctgccatttgttggggagaaagtgactgagatgctggtaaacgtcctgaacatctgctcagatgatgaactggggtcagaagaagatggatttgacggagccacggctgcagcccggaaggaggtcatcaggaacaagatccgagcaataggcaaaatggccagagtattctcagttctcagagaagagagtgagagcgttctaactctgaagggcctgaccccgactggcatgctccccagcggagtgctctctggcgggaaacaaactctgcaaagcgctactgttgaggccattgaggctgatgaagccatcaaaggattctcaccacaacataagattaccagcttcgaggaggccaagggcttagaccgaattaacgagaggatgccgcctcgcagagacgccatgccttccgacgccaaccttaactccatcaacaaggctctcgcctcagagactaacggcacagacagcaacggcagtaatagcagcaatattcagtgaccacttcctgttcactttttttttttgagctgcagggcatgatgggtttgctgcatctcagcagttggatgttcttgcctctgacggtagcttgtttgctctgggggggccaggaattggattcagtttacactatcatgaaaaaaaaaaagagggagagagagagagataataaaactatattttggtgagggtggtgattaaacacctcttttgggtatgcctttaaaaatgcttctaggaaaaaaaaagttttaaaaagaaagctaatgctagtctatacttcaatgttaggggaatgaacacgttttcctagcgcactggggacttttagataggttaatgaaaggccttttattctgttactggacacgaaaactttgtctaatttcttatactctattgtacgtttacagtcgcagcactaaaaatggatgacatcaaacatttttaaacagaaaaaaaagatgtacaaactaaataaggactatttattgataatgttttgctactcttgtcagacaatggctataaactgaattaggcagtcttaaaaaaaaaccg

SEQ ID NO: 7 - DNA, 2618 bp, Rattus norvegicus
gtcctttctctcgccgggtttggagacacgctcccgatttcgaggggagggagacgatggactgagacgatgcacgccatggaatcccgggtattactgagaacgttctgcgtgatcctcgggctcgaagcggtttggggacttggtgtggacccctccctacagattgacgtcttatcagagttagaacttggggagtccacagctggagtgcgccaagtcccaggactgcataatgggacgaaagccttcctcttccaagattcccccagaagcataaaagcacccattgctacagctgagcggtttttccagaagctgaggaataaacacgagttcacaattctggtgaccctgaaacagatccacttaaattcgggagtcattctctccatccaccacttggatcacaggtacctggaactggaaagcagcggccaccggaatgagatcagactgcattaccgctctggaactcaccgcccgcacacggaagtgtttccttatattttggctgatgccaagtggcacaagctctccttagccttcagtgcctcccacttaattttacacatcgactgcaacaagatctatgaacgagtggtggaaatgccttctacagacttgcctctgggcaccacattttggttgggacagagaaataacgcacacgggtattttaagggaataatgcaagatgtgcaattacttgtcatgccccaggggttcatcgctcagtgcccggatcttaatcgaacctgtccaacatgcaacgacttccatgggcttgtgcagaaaatcatggagctgcaggacattttatcgaagacgtcagccaagttgtctagagctgaacaacgaatgaacaggctggatcagtgctactgtgagcggacgtgcaccatgaagggagccacctaccgggagttcgagtcctggacagacggctgcaagaactgcacatgcttgaatgggaccatccagtgcgagactctggtctgccctgctcccgactgcccggctaaatcggctccagcgtacgtggatggcaagtgctgtaaggagtgcaagtccacctgccagttccaggggcggagctactttgagggagaaaggagcacagtcttctcagcttccggaatgtgcgtcttgtatgaatgcaaggatcagaccatgaagcttgttgagaacgccggctgcccggctttagattgccccgagtctcatcagatcgccttgtctcacagctgctgcaaggtttgcaaaggttatgacttctgttctgagaagcatacatgcatggagaactcagtctgcaggaacctgaacgacagggcagtgtgcagctgccgggatggtttccgggccctccgggaggacaatgcctactgtgaagacattgacgagtgtgcagaggggcgccattactgccgtgagaacaccatgtgtgtgaacacaccgggctctttcctgtgtatctgccaaacagggtacatcagaatcgacgattactcgtgtacggaacatgacgagtgcctcacaaaccagcacaactgtgacgagaacgctttgtgctttaacaccgttggaggtcacaactgcgtctgcaagcctgggtacactgggaatggaaccacgtgcaaagctttctgcaaagacggctgcaaaaacggaggtgcctgcattgctgccaatgtctgtgcttgcccacaaggcttcaccggacccagctgtgagacagacattgatgagtgctctgagggctttgttcagtgtgacagccgtgccaactgcattaacctgcctgggtggtaccactgtgagtgcagagatggctaccatgacaatgggatgtttgcgccaggtggagaatcctgtgaagatattgatgaatgtgggactgggaggcacagctgtgccaatgacaccatttgcttcaacttggacggtggctacgattgccggtgtccccatggaaagaactgcacaggggactgcgtgcacgacgggaaagtcaaacacaacggccagatctgggtgctggagaacgacaggtgctctgtgtgttcctgccagactggatttgttatgtgccaacggatggtctgtgactgcgaaaaccccacagttgacctctcctgctgccctgagtgcgacccaaggctgagcagccagtgcctgcatcaaaacggggaaaccgtgtacaacagcggtgacacctgggcccaggattgccgtcagtgccgctgcttgcaagaagaagttgactgctggcccctggcttgcccagaggtagagtgtgaatttagtgtccttcctgagaacgagtgctgcccacgctgtgtcaccgatccttgtcaggctgacaccatccgcaatgacatcaccaaaacctgcctggacgagatgaacgtggttcgcttcactgggtcttcctggatcaagcacggcacggagtgcaccctctgccagtgcaagaacggccacgtgtgctgctcagtggacccacagtgcctccaggagctgtgaagttaactgcctcatgggagatacctgttaaagaatgatttctcatttaaaaaaaaaaaaaaaaaaaaaaaaaaaaaaaaaaaaaaaaa

SEQ ID NO: 8 - DNA, 2386 bp, Rattus norvegicus
gggtcggggtgaggatgctgcggggcggctgcggaggcgtcgcttgctgctgaggcggctgggctctgcgcggcctcggcccgtgacagcgcgacgagcgcggcgcttccgatcggacgaatgcatgacaacatgtccacaatggtgtacatgaaggaagagaagctggagaagcttacgcaggatgaaatcatttctaagaccaagcaggtgatccaggggctggaggccctgaagaatgagcacaactccatcctgcagagtctgctggagacgctgaagtgcttgaagaaggacgatgagagcaacctggtggaggagaagtccagcatgatccgcaagtccttggagatgctggagctcggcctgagcgaggcgcaggtgatgatggccctgtctaatcacctgaatgccgtggagtccgagaagcagaagctccgagctcaggttcgacgtctgtgccaggagaaccagtggctgcgggatgaactggccaacacacagcagaagttacagaagagcgagcagtccgtggctcagctggaggaggagaagaagcacctggagttcatgaaccagctgaagaaatacgacgacgacatctctccctcggaagacaaagactctgattcttccaaagagccgttggatgacctcttcccgaatgatgaggatgacccaggacaaggaatccagcagcaacacagcagtgctgcggccgccgcccagcagggcggctacgagatccctgcccggctgcgcacgctccacaacctggtgatccagtatgcctcgcaggggcgttacgaggtggcggtgccactctgcaagcaggccctggaggacctggagaagacttccggccacgaccaccctgatgtggccaccatgctcaacatcctggccctggtgtacagggatcagaacaagtataaagacgcagcaaacctcctgaacgatgccctggctatccgtgagaaaaccctgggccgagatcaccctgcggtggctgcgaccctcaacaacctagcagtgctgtacggtaagcgtggcaagtacaaagaggccgagccgctgtgcaaacgggccctggagatcagggagaaggttctgggaaaggatcaccctgatgttgctaagcaactaaataatctggccttgctgtgccagaaccagggcaagtacgaggaggtggagtattactaccagagggccctggagatctaccagacgaagctcggacccgatgatcccaacgtggccaagacgaagaataacctggcttcctgttatctgaaacaagggaagttcaaacaagcagaaacattgtacaaggagattctcacccgcgcacatgaacgggagtttggatctgtggatgatgaaaacaagcccatatggatgcacgcggaggagagagaggagtgcaaaggaaagcagaaggacgggtcgtcttttggagagtatggcggctggtataaggcctgcaaagtggacagtcccaccgtcacaaccaccttgaaaaacctgggagcactttaccgccgccaggggaagtttgaagctgcggagacactggaggaagctgccctgaggtcacgtaagcagggtcttgacaatgttcacaaacagagagtggctgaagtgctaaatgaccctgagaacgtggagaagcggaggagccgggagagcctcaatgtggacgtggtcaagtacgagagtggccctgacggaggggaggaagtgagtatgagcgtagagtggaatgggatgagaaagatgaagctcgggctggttaaatgacttgctcagcgtccatggcctagccacccggtgcctcccctctgctcctgcatgacgggcagcgcctcctccggcccctccagtgctgtccgctgtctagcagccctaggagcttgtcagccgcacctctgggactggcccctcctttcggtgctgtcgtcctatggggtcttgatttctggatacatgtagctttgccagatatgtacttagaaatatcaaccgtgttaataagcccattaatgtgtaacacacaagtttaacagttaagagagagtagctgttcatcttgaggacaggcgttagtgtcacacaggtttattacagtggcatgatagtgacctgtgcagtcactgagctgtaggagtgaggcatgtgctgcacgtccctgtcgtacttagagacctggcagtgccctgctccgggcctccccaggacacactgacgtagatttgctgtgtagtcttggtgtggaaatttgaattctgcttttctctactaatctgaagtgctccgtgatgtgtgtatgtgtctttctaacttctaataaactcactccagctgaaaaaaaaaaaaaaaaaaa

SEQ ID NO: 9 - DNA, 1403 bp, Rattus norvegicus
gctgtcgcccgtgcgcctcctagcagctgccagaatgccaaactggggaggaggcaagaaatgcggggtgtgccagaagacagtctactttgctgaggaggtccagtgcgagggcaacagcttccacaaatcctgcttcctgtgcatggtttgcaagaagaatctggacagcaccactgtggcagtgcatggagaagagatctattgcaagtcatgttatggcaagaagtatggaccaaaaggctacggctacgggcagggtgcaggcacgctgagcatggacaagggggagtctctgggcatcaagcatgaggaagcccccggacacaggcctaccaccaaccccaatgcatccaagtttgctcagaagatcggcggctctgagcgctgtccgcgatgcagccaggcagtctatgcagcggagaaggtgatcggtgccgggaagtcctggcataagtcctgcttccgatgtgccaaatgtggcaaaggcctcgagtcgaccaccctggcagacaaggatggtgagatctattgcaaaggatgctatgccaaaaactttgggcccaaaggttttggctttggacaaggagctggcgccttggtccattcagagtgaggctgccgctgcgtaccctgcctactcctgcactctcataagcagtccgttcctggaagccatggacacctccaagatcctctctctcactcagccctgctgcacatcactaatgccttggacttgggtgttctttggcttaggggtctgcctgagttccttccccactaagggcttcctcctgcctggcattcgatacccttatctttaggagacatctgtctagtcaccccttcccagataccaggtccctctcccccacaccttacccctacagacctctgtggccaggacactctctactggccaggacacctgaccccacatctttggagcccaaaagagcaaggcggaagacctgcgctagggaaggctgtggtctattgtatccagagtctctctctgggtaggatgctgagcttcttggtgcctctcagtctggaagtccccgtgagaggcagagaggtgcggataggattgtggggtcatcagaaggagcttgttctctgacctcttgcctttgaatgtggaaataataacttttcacttagggatgaagaagaacgcaggtcagaggaccccaaaatctagaggttgcctgacctcaagttccctgttccatgggcaagggagagcctaatgcataccttgaacaaggcattgacatggatcagtggtccagatcttagagtggtcagttctggttctaagcttgggtctggtggctgggatggacagcttctgttgcagcatagcccagggtagagctgtgttctagccactcctg

SEQ ID NO: 10 - DNA, 991 bp, Rattus norvegicus
ggccatcacattgtggccctctgtgtgctgaaggggggctataagttctttgctgacctgctggattacattaaagcgctgaatagaaatagtgataggtccattcctatgactgtagattttatcagactgaagagctactgtaatgaccagtcaacgggggacataaaagttattggtggagatgatctctcaactttaactggaaagaacgtcttgattgttgaagatataattgacactggtaaaacaatgcagactttgctttccttggtcaagcagtacagccccaaaatggttaaggttgcaagcttgctggtgaaaaggacctctcgaagtgttggatacaggccagactttgttggatttgaaattccagacaagtttgttgttggatatgcccttgactataatgagcacttcagggatttgaatcatgtttgtgtcatcagcgaaagtggaaaagccaagtacaaagcctaaaagacagcggcaagttgaatctacaagagtcctgttgatgtggccagtaaagaactagcagacgttctagtcctgtggccatctacttagtaaagcttttgcatgaaccttctatgaattttatggtttttatttttagaaatgtctgttgctgcgtcccttttgatttgcactatgagcctgtaggcagcctaccgtcaggtagattgtcacttcccttgtgagacagacagatctcttaaattaccactgttaaataataatactgagattgtatctgtaagaaggatttaaaaagaagctgtattagttttttaattggtattttaatttttatatatcaggagagaaagatgtgatattgttaatttagaatagtctaaagcgctcagtttcatatcagtaacagcatctaagaggtttccccagtggaataaacatgtttcagcagtgtgaatcgttgtcaaccgttccttttaaatgcaaataaatacattctaaaaattta

SEQ ID NO: 11 - DNA, 2002 bp, Rattus norvegicus
gagcaaagagagggaagacgcaagctagtctgaaggggttgcgaaaaccccagcaatgtggagaagcctagggcttgccctggctctctgtctcctcccctatggaggagcagagagccaaggccaaagccctgcttgtaagcaagctccaccctggaacataggagatcaaaatccaatgctaaactccgagggcacagtgacagtggttgctcttcttcaagccagctgatacctgtgccttctgcaggcatccagattggaagacctgcgaataaaactagagaaccaaggatattttaacatctcctatattgttgttaatcatcaaggatctccttcccaattaaaacatgcacatcttaaaaagcaggtgtcagatcacattgctgtttacagacaagatgaacatcaaacagatgtctggacactcttaaatggaaacaaagatgacttcctcatatatgacagatgtggccgtcttgtgtatcaccttggtttgccctactccttcctcactttcccgtatgttgaagaagccatcaagatcgcttactgtgagaagaggtgtggaaactgctctttcacgagtcttgaagatgaagccttctgtaaaaacgtgtcctcggctactgcaagtaaaaccacagagccctcagaggagcataaccaccacaagcaccatgacaaacatgggcatgagcatcttgggagcagtaagccttcagagaatcagcaaccaggggcattagatgttgagacaagtcttcctccttcaggcttgcaccaccaccaccaccaccataagcacaagggccagcacaggcagggtcacttagagagctgagacatgggggcaagtgaaggcttgcaactttcacttgcccagaggaagctctgacgaaggggatgcataaaccagctcctgtgtaagttatctgaggagtctggggcagctaccagtagctgctgctgccactgccgacacctcatatttgagaagtcaggatctgcaatcacttgacagtgtgccgaaaacctcccatccttgtgtagctgacaggggcttttcgcggaggagaaagtcattgaatcctgtcaatgtagatcacctccagctgcctgacacagtcagcatgtaagccccacagaagccagccccaactgaagctgaaataataagaccaagaagtgaaaatgaaatttgaactaaatatttaaaataaagcgtactctccccaactccatctaaagacacaatttcatttctagaatgtttccaatccatttaattaattagtgaagtaaaagtagttgaaattggatttgtgcaaacatggagaaatctaccacattggcttctaaaatttaaaatttttatgccacaaaccatttcatccaaatcagatttgtaccgtggggcaactgaaaagtgattgcggccattggttaatatgtcttcctttttctttctccagtgttctagttacattgatgagaacagaaacataaactatgacctaggggtttctgttggatagctcgtaattaagaacggagaaagaacaacaaagacatattttccagttttttttctttacttaaaactttcaaaacaatagaaactttgtctttctaatcttatactttaaaccgattaaatctttaacagactacattttaaatatctacttatcttttttatctctaagactcctagtttgagtttcactacatatatctgtgaatcttgttttttcatctaatgctgtatcagtcttctgagttgtgagtgactgtcttgaaagagtaatggaagaaaagatggtgttaatctgcatagtgcttaagacagtatttccataatcaatgacggtttaatagagaaactgagtcctatgaacctgaactcctttatggctaatacaattaagcaagaatggagaatagaattgattggctacagtacagattatcaaaaataaatgcaacttaaaaagct

SEQ ID NO: 12 - DNA, 4228 bp, Rattus norvegicus
tgtggagaagaagggagcgtcggaccggaacggatgtatacatctcaagattgagaggaagaaacaagtcatgggccagtggtcaagatacttctctgggaattgttgctgctgataactgctttaccaagtcatacaatgagtgtttggtttaaggaagattttaatatttaaaagattttcatcttggaaaattgatcaagtgaagatttcatttctttttttttttgggaaacattttcctcctcataaattacccttgtaatgggcgacatggcaaacaactcagttgcatatagtggtgtgaaaaactctttgaaagaagctaatcatgatggcgactttggcatcacacttgccgagctgcgggccctcatggagctcaggtccacagatgcattacgaaaaatacaggaaagctatggggatgtctatggaatttgcaccaagttgaaaacatctcccaatgaaggtttaagtggaaatcctgcagatttagaaagaagagaagcagtgtttggaaagaactttatacctcctaagaagccaaaaacctttcttcagttagtatgggaagcattacaagatgtcactttaattatactagaaatcgcagccatagtatcattgggcctttctttttatcaacctccggaaggggataatgcactttgtggagaagtttctgttggggaagaagaaggtgaaggagaaacggggtggattgaaggagctgccatcctcttgtcggtggtgtgtgtggtgttagtgacggctttcaatgactggagtaaggagaaacagttccgaggcttgcagagtcgaattgaacaggaacagaagttcaccgtcatcaggggtgggcaggtcatccagatacctgtagctgacattactgttggagacattgcccaagtgaagtacggtgatcttcttccagctgatggtatattgattcaaggcaatgaccttaaaattgacgagagttcgttgactggcgagtctgaccatgttaagaagtctctagataaagaccccttgcttctttcaggtactcatgtaatggaaggttctggaaggatggtcgttactgctgtaggtgtgaactctcaaactgggatcatctttaccttacttggagctggaggcgaagaggaggaaaagaaagatgagaagaagaaagaaaagaaaaataagaaacaagatggagctattgaaaatcgcaacaaagcaaaagcccaagacggcgcggccatggagatgcagcctctgaagagtgaagaagggggagatggtgatgagaaagacaagaagaaagcaaatctgccaaagaaggaaaagtctgtgttacaagggaaacttacgaagctggctgttcagattggcaaagcaggtctgctgatgtctgccatcacggttatcatcctagtgctatattttgtgatcgataccttctgggttcagaagaggccgtggcttgctgagtgcacgccaatctacatccagtactttgtgaagttcttcattatcggggtcaccgttctagtggtcgcggtgccggaaggcctcccgctggccgtcacgatctcactggcttactccgtcaagaaaatgatgaaggataacaacttggtgaggcacctggacgcttgtgagaccatggggaacgctacagctatctgttccgataagacggggaccctgacgatgaacaggatgacggtcgttcaggcctacatcaacgaaaagcattataaaaaggttccggaaccagaagccatcccgccaaatatcctgtcctatctggtaacaggaatttctgtgaattgtgcttatacatcaaaaatattgccaccggagaaagagggtggattacctcgtcatgtggggaataaaacagaatgtgccttgttgggatttctcttggatttaaagcgggattatcaagatgttagaaatgaaataccagaagaagcattgtacaaagtctataccttcaattctgttaggaaatccatgagtacagtcctaaagaattcagatggaagtttccggatcttcagcaagggtgcatctgagataattctgaaaaagtgtttcaaaatcttgagtgctaatggtgaggccaaagtgttccgacccagagaccgagatgacattgtgaagacggtgattgagcccatggcatctgaaggcctgagaaccatatgcctagcgttcagagacttccccgcaggagagccagaaccagagtgggataacgagaacgatgtcgtcaccggccttacttgcatcgctgttgtggggattgaagatcctgtgaggcctgaggtaccagaggcaataaagaaatgtcagagggctggaattaccgtgcgcatggtcactggtgataatattaacacagctcgggccattgctaccaaatgcggtattttacacccaggggaagatttcctgtgcttagaaggtaaagattttaaccgaagaatacgaaatgaaaaaggagagattgaacaagagaggatagacaagatttggccaaagcttcgagtgcttgcaagatcatctcccactgacaaacatacactggttaaaggtataattgacagcacagtctcagagcaacgccaggttgtagctgtgacaggggatggtacaaatgacgggcctgcgctgaagaaagcagacgttggctttgcaatgggcattgctggaactgatgtggctaaagaagcatctgatatcattctcacagatgacaacttcacaagcattgttaaagcggttatgtggggacggaatgtctatgacagcatctcaaaattccttcagttccagcttactgttaatgtagtggccgtgattgtcgctttcacgggcgcttgtattactcaagactcgccactgaaggcggtacagatgctctgggtcaacctcatcatggacacgctggcctccctggctctggcgacagaaccacccaccgagtcactcctgctccggaagccttacgggagaaacaagcctctcatctcacgcacaatgatgaagaatatcttgggccatgcgttctatcagctcgtagtggtcttcacgctcttgttcgctggagagaagtttttcgatatcgacagtgggaggaacgcccctctgcatgctccaccgtcagagcactacaccattgtgttcaacacctttgtgctgatgcagctcttcaatgaaataaatgcccggaaaattcatggggaaagaaatgtgtttgaagggatcttcaacaacgccatcttctgcacaattgtcttaggcacctttgtggtgcagataataatcgtgcagtttggcgggaagcctttcagctgctcagaactttcaatagaacaatggctgtggtccatattcctgggaatggggaccttactctggggccagcttatttcaaccattccaaccagccgcttaaagtttctaaaagaagctggccatgggacacagaaggaagagatccctgaggaggaattggcggaggatgttgaagagattgaccatgccgaacgggagttgcggcgtggccagatcttgtggtttagaggcctgaacagaatccaaacacagatggatgtagtgaatgctttccagagtggaggttccattcagggggctctaaggcgacaaccctccatcgccagccagcaccatgatgtaacaaatgtttctacccctacacatgtagtgttttcctcttctactgcttctactcctgtggggtatccgagtggtgaatgcatttcgtagctctttatacgaagggttagagaagccagaatcaagaagttcaatccacaactttatgacacaccccgagtttaggatagaagattcagagccgcacatcccccttatcgatgacactgatgctgaagatgacgctcctactaaacgcaactccagccctccgccctctcctaacaaaaataacaatgccgttgacagcgggatccaccttacaatagaaatgaacaagtctgctacctcttcgtccccagggagcccactgcatagtttggaaacatcactctgattgtaagctgaacgttaacacactagccgcactgtaaagaaacaaattgaaactgagtcttttcacacattgtgacggacaagatggcgttcttgtctccggacttcaacagaagacacacttgtacgaatgtagatttattttttt

SEQ ID NO: 13 - DNA, 2350 bp, Homo sapiens
ctggcggagcagaggtgcagaagcaactgagtccaagttgtctggccggcttcaggtggacccagaagacgtccccaactcagggagattcagcgatcactcactcactcgctgtacagaatgatattcctcacggcactgcctctgttctggattatgatttcagcctcccgagggggtcactggggtgcctggatgccctcgtccatctcggccttcgaaggcacgtgcgtctccatcccctgccgctttgacttcccggatgagctgcggcccgctgtggtgcatggtgtctggtacttcaatagcccctaccccaagaactaccccccggtggtcttcaagtcgcgcacccaagtagtccacgagagcttccagggccgcagccgcctcctgggggacctgggcctgcgaaactgcaccctcctgctcagcaacgtcagccccgagctgggcgggaagtactacttccgtggggacctgggcggctacaaccagtacaccttctcagagcacagtgtcctggatatcgtcaacacccccaacatcgtggtgcccccagaggtggtggcaggcacggaggtggaggtcagctgcatggtgccggacaactgcccagagctgcgccctgagctgagctggctgggccacgaggggctgggggagcccgctgtgctgggccggctgcgggaggacgagggcacctgggtgcaggtgtcactgctgcacttcgtgcccacgagggaggccaacggccacaggctgggctgccaggcctccttccccaacaccaccctgcagttcgagggctacgccagcatggacgtcaagtaccccccggtgattgtggagatgaactcctcggtggaggccatcgagggctcccacgtgagcctgctctgtggggctgacagcaaccccccgccgctgctgacctggatgcgggacgggacagtcctccgggaggcggtggccgagagcctgctcctggagctggaggaggtgacccccgccgaagacggcgtctatgcctgcctggccgagaatgcctatggccaggacaaccgcaccgtggggctcagtgtcatgtatgcaccctggaagccaacagtgaacgggacaatggtggccgtagagggggagacggtctctatcttgtgctccacacagagcaacccggaccctattctcaccatcttcaaggagaagcagatcctgtccacggtcatctacgagagcgagctgcagctggagctgcccgccgtgtcacccgaggatgatggagagtactggtgtgtggctgagaaccagtatggccagagggccaccgccttcaacctgtctgtggagttcgcccctgtgctcctcctggagtcccactgcgcggcagcccgagacacggtgcagtgcctgtgcgtggtgaagtccaacccggagccgtccgtggcctttgagctgccatcgcgcaatgtgaccgtgaacgagagcgagcgggagttcgtgtactcggagcgcagcggcctcgtgctcaccagcatcctcacgctgcgggggcaggcccaggccccgccccgcgtcatctgcaccgcgaggaacctctatggcgccaagagcctggagctgcccttccagggagcccatcgactgatgtgggccaagatcgggcctgtgggcgccgtggtcgcctttgccatcctgattgccatcgtctgctacattacccagacacgcaggaaaaagaacgtgacagagagccccagcttctcggcaggggacaaccctcccgtcctgttcagcagcgacttccgcatctctggggcaccagagaagtacgagagcgagaggcgcctgggatctgagaggaggctgctgggccttcggggtgagcccccagagctggacctgagctattctcactcggacctggggaaacggcccaccaaggacagctacacgctgacggaggagctagctgagtatgctgaaatccgggtcaagtgaaggagctgggggcagcctgcgtggctgacccccctcaggaccctcgctggcccccactggctgtgggctcccttcctcccaaaagtatcgggggctgggccaggagggagtgaggcaggtgacagtgaggtcctgggggcctgacctccccctccttcccagctgcccctccctgccagcacccccacgccctcattacggctcctctctaacctcctttaccctcatctgtctggaggggagctctgtctgtccgtgttatttattgctacttcctgcctggtctcctgcccccacacctggccctggggcctgtacaaaagggacatgaaataaatgccccaaagcc

SEQ ID NO: 14 - DNA, 1762 bp, Homo sapiens
cttcttccgcaagatgtcatcctcaggggccaaggacaagcctgagctgcagtttcccttccttcaggatgaggacacagtggccacgctgctagagtgcaagacgctcttcatcttgcgcggcctgccaggaagcggcaagtccacgctggcacgggtcatcgtggacaagtaccgtgatggcaccaagatggtgtcggctgacgcttacaagatcacccccggcgctcgaggagccttctccgaggagtacaagcggctcgatgaggacctggctgcctactgccgccgccgggacatcagaattcttgtgcttgatgacaccaaccacgaacgggaacggctggagcagctctttgaaatggccgaccagtaccagtaccaggtggtgctggtggagcccaagacggcgtggcggctggactgtgcccagctcaaggagaagaaccagtggcagctgtcggctgatgacctgaagaagctgaagcctgggctggagaaggacttcctgccgctctacttcggctggttcctgaccaagaagagctctgagaccctccgcaaagccggccaggtcttcctggaagagctggggaaccacaaggccttcaagaaggagctgcgacaattcgtccctggggatgagcccagggagaagatggacttggtcacctactttggaaagagacccccaggcgtgctgcattgcacaaccaagttttgtgactacgggaaggctcccggggcagaggagtacgctcaacaagatgtgttaaagaaatcttactccaaggccttcacgctgaccatctctgccctctttgtgacacccaagacgactggggcccgggtggagttaagcgagcagcaactgcagttgtggccgagtgatgtggacaagctgtcacccactgacaacctgccgcgggggagccgcgcccacatcaccctcggctgtgcagctgacgtagaggccgtgcagacgggccttgacctcttagagattctgcggcaggagaaggggggcagccgaggcgaggaggtgggcgagctaagccggggcaagctctattccttgggcaatgggcgctggatgctgaccctggccaagaacatggaggtcagggccatcttcacggggtactacgggaaaggcaaacctgtgcccacgcaaggtagccggaaggggggcgccttgcagtcctgcaccatcatatgagtgttctcaccaccacttatgcccctagaagggaaggggagagggaaacgtgccctctgtttgatccttgttttgtgacatttttttttttttttttttttactcaaagttaacctacctgtaactttttaaaaacttgtaaaataactgaccctcccttcctgtccgccctcttcccctctaatgctcacgctcccaacacaaggtgggcagggaggcaccattcaggaacctggaccaaagctgacgaggctgggccaagccagggatggggccacagccagaaccccgagccctacttccaggttctggttagctcagccccagcccagcccagctgctctgcccagagctgggtgagtggggagacacctcagagccccgcaaaacccactgaccggaggcaaaaggcagtggggctgggggtagttttccatggtcacagagaactagtggtggctctgagaaggggaggacctctgggctttgattccatctccttgtcttttttctttgtttttagagacagggtcctgctatttc

SEQ ID NO: 15 - DNA, 778 bp, Homo sapiens
ccccccatcctatcttgttttctttctcagaagctgtagatgaaaccaaacctaaggaaagtgcccggcaggacgagggtaaagaagaggaacctgaggctgaccaagaacatgcctgaactctaagaaatggctttccacatccccaccctcccctctcctgagcctgtctctccctaccctcttctcagctccactctgaagtcccttcctgtcctgctcacgtctgtgagtctgtcctttcccacccactagccctctttctctctgtgtggcaaacatttaaaaaaaaaaaaaaaaagcaggaaagatcccaagtcaaacagtgtggcttaaacattttttgtttcttggtgttgttatggcaagtttttggtaatgatgattcaatcattttgggaaattcttgcactgtatccaagttatttgatctggtgcgtgtggccctgtgggagtccactttcctctctctctctctctctgttccaagtgtgtgtgcaatgttccgttcatctgaggagtccaaaatatcgagtgaattcaaaatcatttttgttttcctccttttcaatgtgatggaatgaacaaaaaggaaaaaattcaaaaaacccagtttgttttaaaaataaataaataaagcaaatgtgccaattagcgtaaacttgcggctctaaggctcctttttcaacccgaatattaataaatcatgagagtaatcaaggtccaatggctctgtgtttctgttctaccttctcattagttggttggacatgctagg

SEQ ID NO: 16 - DNA, 696 bp, Homo sapiens
ccactgctcaggtctgcacatccctacaatggctaaaacagcaatggcctacaaggaaaaaatgaaggagctgtccatgctgtcactgatctgctcttgcttttacccggaacctcgcaacatcaacatctatacttacgatgatatggaagtgaagcaaatcaacaaacgtgcctctggccaggcttttgagctgatcttgaagccaccatctcctatctcagaagccccacgaactttagcttctccaaagaagaaagacctgtccctggaggagatccagaagaaactggaggctgcaggggaaagaagaaagtctcaggaggcccaggtgctgaaacaattggcagagaagagggaacacgagcgagaagtccttcagaaggctttggaggagaacaacaacttcagcaagatggcggaggaaaagctgatcctgaaaatggaacaaattaaggaaaaccgtgaggctaatctagctgctattattgaacgtctgcaggaaaaggagaggcatgctgcggaggtgcgcaggaacaaggaactccaggttgaactgtctggctgaagcaagggagggtctggcacgccccaccaatagtaaatccccctgcctatatttataatggatcatgcgatatcatgcgatatcaggatggggaattgatgacaatggtttaaaagactctattataa

SEQ ID NO: 17 - DNA, 2175 bp, Homo sapiens
tgagtgtggaggcgcggacgcgcggcggagctggaactgctgcagctgctgccgccgccggaggaaccttgatccccgtgctccggacaccccgggcctcgccatggctgaccagctgactgaggagcagattgcagagttcaaggaggccttctccctctttgacaaggatggagatggcactatcaccaccaaggagttggggacagtgatgagatccctgggacagaaccccactgaagcagagctgcaggatatgatcaatgaggtggatgcagatgggaacgggaccattgacttcccggagttcctgaccatgatggccagaaagatgaaggacacagacagtgaggaggagatccgagaggcgttccgtgtctttgacaaggatgggaatggctacatcagcgccgcagagctgcgtcacgtaatgacgaacctgggggagaagctgaccgatgaggaggtggatgagatgatcagggaggctgacatcgatggagatggccaggtcaattatgaagagtttgtacagatgatgactgcaaagtgaaggccccccgggcagctggcgatgcccgttctcttgatctctctcttctcgcgcgcgcactctctcttcaacactcccctgcgtaccccggttctagcaaacaccaattgattgactgagaatctgataaagcaacaaaagatttgtcccaagctgcatgattgctctttctccttcttccctgagtctctctccatgcccctcatctcttccttttgccctcgcctcttccatccacgtcttccaaggcctgatgcattcataagttgaagccctccccagatccccttggagcctctgccctcctccagcccggatggctctccttcattttggtttgtttcctcttgtttgtcatcttattttgggtgctggggtggctgccagcctgtcccgggacctgctgggagggacaagaggccctccccaggcagaagagcatgccctttgccgttgcatgcaaccagccctgtgattccacgtgcagatcccagcagcctgttggggcaggggtgccaagagaggcattccagaaggactgagggggcgttgaggaattgtggcgttgactggatgtggcccaggactgggtcgagggggccaactcacagaaggggactgacagtgggcaacactcacatcccactggctgctgttctgaaaccatctgattggctttctgaggtttggctgggtggggactgctcatttggccactctgcagattggacttgcccgcgttcctgaagcgctctcgagctgttctgtaaatacctggtgctaacatcccatgccgctccctcctcacgatgcacccaccgccctgagggcccgtcctaggaatggatgtggggatggtcgctttgtaatgtgctggttctctttttttttctttcccctctatggcccttaagactttcattttgttcagaaccatgctgggctagctaaagggtggggagagggaagatgggccccaccagctctcaagagaaacgcacctgcaataaaacagtcttgtcggccagctgcccagggacggcagctacagcagcctctgcgtcctggtccgccagcacctcccgcttctccgtggtgacttggcgccgcttcctcacatctgtgctccgtgccctcttccctgcctcttccctcgcccacctgcctgcccccatactccccagcggagagcatgatccgtgcccttgcttctgactttcgcctctgggacaagtaagtcaatgtgggcagttcagtcgtctgggttttttccccttttctgttcatttcatctggctccccccaccacctccccaccccaccccccaccccctgcttcccctcactgcccaggtcgatcaagtggcttttcctgggacctgcccagctttgagaatctcttctcatccaccctctggcacccagcctctgagggaaggagggatggggcatagtgggagacccagccaagagctgagggtaagggcaggtaggcgtgaggctgtggacattttcggaatgttttggttttgttttttttaaaccgggcaatattgtgttcagttcaagctgtgaagaaaaatatatatcaatgttttccaataaaatacagtgactacctg

SEQ ID NO: 18 - DNA, 3079 bp, Homo sapiens
gggccctacagagggtccgccatgttccccggcggcgccgccgcttggctctggtagccgccgcccccgcccccaaccccgcccggcccagagcctagccgagccccgggcccagcatggccgccccggagccggcccgggctgcaccgcccccacccccgcccccgccgccccctcccggggctgaccgcgtcgtcaaagctgtccctttccccccaacacatcgcttgacatctgaagaagtatttgatttggatgggatacccagggttgatgttctgaagaaccacttggtgaaagaaggtcgagtagatgaagaaattgcgcttagaattatcaatgagggtgctgccatccttcggagagagaaaaccatgatagaagtagaagctccaatcacagtgtgtggtgacatccatggccaattttttgatctgatgaaactttttgaagtaggaggatcacctgctaatacacgatacctttttcttggcgattatgtggacagaggttattttagtatagagtgtgtcttatatttatgggttctgaagattctatacccaagcacattatttcttctgagaggcaaccatgaatgcagacaccttactgaatattttacctttaagcaggaatgtaaaattaagtattcggaaagagtctatgaagcttgtatggaagcttttgatagtttgcctcttgctgcacttttaaaccaacagtttctttgtgttcatggtggactttcaccagaaatacacacactggatgatattaggagattagatagattcaaagagccacctgcatttggaccaatgtgtgacttgttatggtccgatccttctgaagattttggaaatgaaaaatcacaggaacattttagtcacaatacagttcgaggatgttcttatttttataactatccagcagtgtgtgaatttttgcaaaacaataatttgttatcgattattagagctcatgaagctcaagatgcaggctatagaatgtacagaaaaagtcaaactacagggttcccttcattaataacaattttttcggcacctaattacttagatgtctacaataataaagctgctgtattaaagtatgaaaataatgtgatgaatattcgacagtttaactgttctccacatccttactggttgcctaattttatggatgtcttcacgtggtctttaccgtttgttggagaaaaagtgacagaaatgttggtaaatgttctgagtatttgctctgatgatgaactaatgactgaaggtgaagaccagtttgatggttcagctgcagcccggaaagaaatcataagaaacaaaattcgagcaattggcaagatggcaagagtcttctctgttctcagggaggagagtgaaagtgtgctgacactcaagggcctgactcccacagggatgttgcctagtggagtgttagctggaggacggcagaccctgcaaagtgccacagttgaggctattgaggctgaaaaagcaatacgaggattctctccaccacatagaatctgcagttttgaagaggcaaagggtttggataggatcaatgagagaatgccacctcggaaagatgctgtacagcaagatggtttcaattctctgaacaccgcacatgccactgagaaccacgggacgggcaaccatactgcccagtgacccactacttcccagggactctcacatctcgggccccaaatggacagatcacccgaggagctggaggggtcggccaagctgactgtaaatttcacagtctctctgaagaaaccattgtgcttctgagaccctagcccccttcctggatggaggcttgagggccctgggacatgtgctatctgataagattgggtcatcgctgccaaggtggagagcagtgagcaaggggcttggggcaatttccagtggagggcatccacacctccattttatgcttgtggttcacacatttaagtttacaaatcagatttcttttccccttcagtagaattagattttgtttttcaatcatgatttcaaatgcaatcctaagagctaatgtggacttttctttttccatgaaatgtctttaaaggatgaattagcatggtcttaaaatacatttctgaggttactagctgtattttgaattgtgagcaaaatgccgagaaacccagttggcatttatacaaaatgttgacctcaggtctatagttcttaaatgtggctaattctgtaacatagtcttggtattttttaattatgaatgcatatcctatttccaggcaggctctcttacttgaacacaaatccaaaaactaatttagagtcttttttgcccagatcttttaagacttacaccccagagatttaagaagaaaacctctaaatttcaaaattatgaagaattacagaattactcatttaaggtactttaaaagaagtttgtacattgtcaaagtaaattttaattcaaatcatgtctgtaaaacttgacgtattttgtgtatgcatgttttcattttgcaaatatttaatatatagacctatgatgtacaggtacgacatgtataggttacctagatgttatgagaaattttagtttattgtgagtactcaagttgcttagagagccaccagggtgatttgctgctggctttctatcatttttatgttttaatgcaaaggaaattttaaaatgttctggaagtgtttttgattaagcaatgcagcctagaagcaatggttctgttcaatcattcagatgttagtggaagcataaaagtcaagactgcatgttgaaacctttcttttgatagttactgaactgcttggttaaactaaatggaaccatgtgctaatttttcacaattattgacctgtattgattgccactgtagtttggtatttccctttactttggtggcctgcttccctcatgccctggaatacaactcagagctccaggcagcggaaccatctattgttttgtttgccagaaagtgcaccctgtatggtctcctgtctaagttggaaatattatgcatgtgcaggactattcgagtatt

SEQ ID NO: 19 - DNA, 3198 bp, Homo sapiens
ttgggaggagcagtctctccgctcgtctcccggagctttctccattgtctctgcctttacaacagagggagacgatggactgagctgatccgcaccatggagtctcgggtcttactgagaacattctgtttgatcttcggtctcggagcagtttgggggcttggtgtggacccttccctacagattgacgtcttaacagagttagaacttggggagtccacgaccggagtgcgtcaggtcccggggctgcataatgggacgaaagcctttctctttcaagatactcccagaagcataaaagcatccactgctacagctgaacagttttttcagaagctgagaaataaacatgaatttactattttggtgaccctaaaacagacccacttaaattcaggagttattctctcaattcaccacttggatcacaggtacctggaactggaaagtagtggccatcggaatgaagtcagactgcattaccgctcaggcagtcaccgccctcacacagaagtgtttccttacattttggctgatgacaagtggcacaagctctccttagccatcagtgcttcccatttgattttacacattgactgcaataaaatttatgaaagggtagtagaaaagccctccacagacttgcctctaggcacaacattttggctaggacagagaaataatgcgcatggatattttaagggtataatgcaagatgtccaattacttgtcatgccccagggatttattgctcagtgcccagatcttaatcgcacctgtccaacttgcaatgacttccatggacttgtgcagaaaatcatggagctacaggatattttagccaaaacatcagccaagctgtctcgagctgaacagcgaatgaatagattggatcagtgctattgtgaaaggacttgcaccatgaagggaaccacctaccgagaatttgagtcctggatagacggctgtaagaactgcacatgcctgaatggaaccatccagtgtgaaactctaatctgcccaaatcctgactgcccacttaagtcggctcttgcgtatgtggatggcaaatgctgtaaggaatgcaaatcgatatgccaatttcaaggacgaacctactttgaaggagaaagaaatacagtctattcctcttctggagtatgtgttctctatgagtgcaaggaccagaccatgaaacttgttgagagttcaggctgtccagctttggattgtccagagtctcatcagataaccttgtctcacagctgttgcaaagtttgtaaaggttatgacttttgttctgaaaggcataactgcatggagaattccatctgcagaaatctgaatgacagggctgtttgtagctgtcgagatggttttagggctcttcgagaggataatgcctactgtgaagacatcgatgagtgtgctgaagggcgccattactgtcgtgaaaatacaatgtgtgtcaacaccccgggttcttttatgtgcatctgcaaaactggatacatcagaattgatgattattcatgtacagaacatgatgagtgtatcacaaatcagcacaactgtgatgaaaatgctttatgcttcaacactgttggaggacacaactgtgtttgcaagccgggctatacagggaatggaacgacatgcaaagcattttgcaaagatggctgtaggaatggaggagcctgtattgccgctaatgtgtgtgcctgcccacaaggcttcactggacccagctgtgaaacggacattgatgaatgctctgatggttttgttcaatgtgacagtcgtgctaattgcattaacctgcctggatggtaccactgtgagtgcagagatggctaccatgacaatgggatgttttcaccaagtggagaatcgtgtgaagatattgatgagtgtgggaccgggaggcacagctgtgccaatgataccatttgcttcaatttggatggcggatatgattgtcgatgtcctcatggaaagaattgcacaggggactgcatccatgatggaaaagttaagcacaatggtcagatttgggtgttggaaaatgacaggtgctctgtgtgctcatgtcagaatggattcgttatgtgtcgacggatggtctgtgactgtgagaatcccacagttgatcttttttgctgccctgaatgtgacccaaggcttagtagtcagtgcctccatcaaaatggggaaactttgtataacagtggtgacacctgggtccagaattgtcaacagtgccgctgcttgcaaggggaagttgattgttggcccctgccttgcccagatgtggagtgtgaattcagcattctcccagagaatgagtgctgcccgcgctgtgtcacagacccttgccaggctgacaccatccgcaatgacatcaccaagacttgcctggacgaaatgaatgtggttcgcttcaccgggtcctcttggatcaaacatggcactgagtgtactctctgccagtgcaagaatggccacatctgttgctcagtggatccacagtgccttcaggaactgtgaagttaactgtctcatgggagatttctgttaaaagaatgttctttcattaaaagaccaaaaagaagttaaaacttaaattgggtgatttgtgggcagctaaatgcagctttgttaatagctgagtgaactttcaattatgaaatttgtggagcttgacaaaatcacaaaaggaaaattactggggcaaaattagacctcaagtctgcctctactgtgtctcacatcaccatgtagaagaatgggcgtacagtatataccgtgacatcctgaaccctggatagaaagcctgagcccattggatctgtgaaagcctctagcttcactggtgcagaaaattttcctctagatcagaatcttcagaatcagttaggttcctcactgcaagaaataaaatgtcaggcagtgaatgaattatattttcagaagtaaagcaaagaagctataacatgttatgtacagtacactctgaaaagaaatctgaaacaagttattgtaatgataaaaataatgcacaggcatggttacttaatattttctaacaggaaaagtcatccctatttccttgttttactgcacttaatattatttggttgaatttgttcagtataagctcgttcttgtgcaaaattaaataaatatttctcttacctt

SEQ ID NO: 20 - DNA, 2308 bp, Homo sapiens
gaattcgggcgagcgggactggctgggtcggctgggctgctggtgcgaggagccgcggggctgtgctcggcggccaaggggacagcgcgtgggtggccgaggatgctgcggggcggtagctccggcgcccctagctggtgactgctgcgccgtgcctcacacagccgaggcgggctcggcgcacagtcgctgctccgcgcgcgcgcccggcggcgctccaggtgctgacagcgcgagagagcgcggccctcaggagcaaggcgaatgtatgacaccatgtccacaatggtgtacataaaggaagacaagttggagaagcttacacaggatgaaattatttctaagacaaagcaagtaattcaggggctggaagctttgaagaatgagcacaattccattttacaaagtttgctggagacactgaagtgtttgaagaaagatgatgaaagtaatttggtggaggagaaatcaaacatgatccggaagtcactggagatgttggagctcggcctgagtgaggcacaggttatgatggctttgtcaaatcacctgaatgctgtggagtccgagaagcagaaactgcgtgcgcaggttcgtcgtctgtgccaggagaatcagtggctacgggatgaactggccaacacgcagcagaaactgcagaagagtgagcagtctgtggctcaactggaggaggagaagaagcatctggagtttatgaatcagctaaaaaaatatgatgacgacatttccccatccgaggacaaagacactgattctaccaaagagcctctggatgaccttttccccaatgatgaagacgacccagggcaaggaatccagcagcagcacagcagtgcagccgcggctgcccagcagggcggctacgagatccccgcgcggctgcggacgctccacaacctggtgatccagtacgcctcgcaggggcgctacgaggtagctgtgcccctctgcaagcaggccctggaggacctggagaagacttcaggacacgaccacccggacgtggccaccatgctcaacatcctggccttggtgtacagggatcagaataaatacaaagatgcagctaacctactgaatgatgccttggctattcgtgagaaaactttgggcaaagatcatcctgcggtggcggcgactttgaataaccttgcagtcctttatggtaaaagagggaagtacaaagaagcagagccgttgtgtaaaagagctctggaaatccgagaaaaggttttggggaaggatcaccccgatgttgccaagcagttaaataacttggccttactgtgccagaaccagggcaagtatgaagaagtagaatattattatcaaagagccctcgagatctaccagacaaaactgggacctgatgaccccaacgtggctaagacgaaaaataacctggcatcctgctatttgaaacaaggaaagttcaagcaagcagaaacactgtacaaagagattctcactcgtgcacatgaaagggagtttggttctgtagatgatgaaaataaacccatctggatgcatgctgaagaaagagaagaatgcaaaggaaagcaaaaggatgggacatcttttggagagtatggcggctggtacaaagcctgcaaagttgatagtccaactgttacaaccactctaaaaaaccttggggcactttacagacgtcaaggcaaatttgaagctgcagaaacgttagaagaagctgctatgaggtctcgtaaacagggtcttgacaatgttcacaaacagagggtggcagaagtgctcaatgaccctgagaacatggagaagcgcaggagccgtgagagcctcaacgtggacgtggtcaagtacgagagtggccctgacggaggggaggaagtgagtatgagcgtagagtggaacgggggcgtctctggccgagcctctttttgtggaaaacgacagcagcagcagtggcctggaagacgccaccgctaactgaccccgacctggccccgctccaggatgggactgccgagtgtggcccggagctggcccgggacagccagggcggcagggaggcccctggccgggagcgcagcgctcactcatttctcctgcgtctgtgtgcataggacatgatactaataaccacacggctggcgtgaccttggggctggggctgggcctaagctggtgccctggtgcggcgtggtctctcccaggagacctggggcatgagctgggcccacggctcccttcccatgtgtaacttcctcacgttgtgtgcgataacgtattttattgtacacccgaattc

SEQ ID NO: 21 - DNA, 2287 bp, Homo sapiens
gtggggtaacagctactttggtgttaaacccaccccctcacctgccttttgtggtatagctggtgaccctaatcatcaggccattgcaacatagcatggaagatggtgcgaggtggcgtgtggtccctggccttctccctctactgccttgcaccataggccatgtcctcccagcagcaccagctgagtagacttcagaagtggcttgagcccttataccatggttatgtcaaagggagtgggccctggggtggagggtaccctcatcactggtggcagccattaactatttccttccctgcctagtcctggcataaggcctgctttcgatgtgccaagtgtggcaaaggccttgagtcaaccaccctggcagacaaggatggcgagatttactgcaaaggtgggtgttttcacttctaattgagggtcaggaggcccaagggggtaggggggctaagtagttttgcctttgctgaatgtaaactaattcctggccttgggatccaagatctgaacatctagtatgattccttcattgtacagatgaggaaacaagaccagagggggaaagcaacttggccagcatcatctggcaaattgaggcaggcatagggctagaccctggcttcctaactcccagtccaatgttcttacagcagatgatgcttctataattttggtggcaggggcaatgggtacagggtacaaccaagagcctcttcgctattttactattgagattggggtgctgtggaggtgagggggtaccagtggaccttccttccctagcagtctggctgggcactaggagtgggggatcttcagcaggagggtgggtggtgtggctgggggtggaggaagaacatgcccttatctctctcctctctctgcaggatgttatgctaaaaacttcgggcccaagggctttggttttgggcaaggagctggggccttggtccactctgagtgaggccaccatcacccaccacaccctgcccactcctgcgcttttcatcgccattccattcccagcagctttggagacctccaggattatttctctgtcagccctgccacatatcactaatgacttgaacttgggcatctggctccctttggtttgggggtctgcctgaggtcccaccccactaaagggctccccaggcctgggatctgacaccatcaccagtaggagacctcagtgttttgggtctaggtgagagcaggcccctctccccacacctcgccccacagagctctgttcttagcctcctgtgctgcgtgtccatcatcagctgaccaagacacctgaggacacatcttggcacccagaggagcagcagcaacaggctggagggagagggaagcaagaccaagatgaggaggggggaaggctgggttttttggatctcagagattctcctctgtgggaaagaggttgagcttcctggtgtccctcagagtaagcctgaggagtcccagcttagggagtcactattggaggcagagaggcatgcaggcggggtcctaggagcccctgcttctccaggcctcttgcctttgagtctttgtggaatggatagcctcccactaggactgggaggagaataacccaggtcttaaggaccccaaagtcaggatgttgtttgatcttctcaaacatctagttccctgcttgatgggaggatcctaatgaaatacctgaaacatatattggcatttatcaatggctcaaatcttcatttatctctggccttaaccctggctcctgaggctgcggccagcagagcccaggccagggctctgttcttgccacacctgcttgatcctcagatgtggagggaggtaggcactgcctcagtcttcatccaaacacctttccctttgccctgagacctcagaatcttccctttaacccaagaccctgcctcttccactccacccttctccagggacccttagatcacatcactccacccctgccaggccccaggttaggaatagtggtgggaggaaggggaaagggctgggcctcaccgctcccagcaactgaaaggacaacactatctggagccacccactgaaagggctgcaggcatgggctgtacccaagctgatttctcatctggtcaataaagctgtttagaccagaactctggtgtccaatcctgtgtctgtggagctgggagggaactcaatgggagcaatcaaattagcaggggctttgggaggccgaggcaggcggatcacctgaggtcaggagtttgagaccagcctggctaacatg

SEQ ID NO: 22 - DNA, 1331 bp, Homo sapiens
tcttgctgcgcctccgcctcctcctctgctccgccaccggcttcctcctcctgagcagtcagcccgcgcgccggccggctccgttatggcgacccgcagccctggcgtcgtgattagtgatgatgaaccaggttatgaccttgatttattttgcatacctaatcattatgctgaggatttggaaagggtgtttattcctcatggactaattatggacaggactgaacgtcttgctcgagatgtgatgaaggagatgggaggccatcacattgtagccctctgtgtgctcaaggggggctataaattctttgctgacctgctggattacatcaaagcactgaatagaaatagtgatagatccattcctatgactgtagattttatcagactgaagagctattgtaatgaccagtcaacaggggacataaaagtaattggtggagatgatctctcaactttaactggaaagaatgtcttgattgtggaagatataattgacactggcaaaacaatgcagactttgctttccttggtcaggcagtataatccaaagatggtcaaggtcgcaagcttgctggtgaaaaggaccccacgaagtgttggatataagccagactttgttggatttgaaattccagacaagtttgttgtaggatatgcccttgactataatgaatacttcagggatttgaatcatgtttgtgtcattagtgaaactggaaaagcaaaatacaaagcctaagatgagagttcaagttgagtttggaaacatctggagtcctattgacatcgccagtaaaattatcaatgttctagttctgtggccatctgcttagtagagctttttgcatgtatcttctaagaattttatctgttttgtactttagaaatgtcagttgctgcattcctaaactgtttatttgcactatgagcctatagactatcagttccctttgggcggattgttgtttaacttgtaaatgaaaaaattctcttaaaccacagcactattgagtgaaacattgaactcatatctgtaagaaataaagagaagatatattagttttttaattggtattttaatttttatatatgcaggaaagaatagaagtgattgaatattgttaattataccaccgtgtgttagaaaagtaagaagcagtcaattttcacatcaaagacagcatctaagaagttttgttctgtcctggaattattttagtagtgtttcagtaatgttgactgtattttccaacttgttcaaattattaccagtgaatctttgtcagcagttcccttttaaatgcaaatcaataaattcccaaaaattt

SEQ ID NO: 23 - DNA, 2038 bp, Homo sapiens
gcaggcccgttggaagtggttgtgacaaccccagcaatgtggagaagcctggggcttgccctggctctctgtctcctcccatcgggaggaacagagagccaggaccaaagctccttatgtaagcaacccccagcctggagcataagagatcaagatccaatgctaaactccaatggttcagtgactgtggttgctcttcttcaagccagctgatacctgtgcatcatcgaggcatctaaattagaagacctgcgagtaaaactgaagaaagaaggatattctaatatttcttatattgttgttaatcatcaaggaatctcttctcgattaaaatacacacatcttaagaataaggtttcagagcatattcctgtttatcaacaagaagaaaaccaaacagatgtctggactcttttaaatggaagcaaagatgacttcctcatatatgatagatgtggccgtcttgtatatcatcttggtttgcctttttccttcctaactttcccatatgtagaagaagccattaagattgcttactgtgaaaagaaatgtggaaactgctctctcacgactctcaaagatgaagacttttgtaaacgtgtatctttggctactgtggataaaacagttgaaactccatcgcctcattaccatcatgagcatcatcacaatcatggacatcagcaccttggcagcagtgagctttcagagaatcagcaaccaggagcaccaaatgctcctactcatcctgctcctccaggccttcatcaccaccataagcacaagggtcagcataggcagggtcacccagagaaccgagatatgccagcaagtgaagatttacaagatttacaaaagaagctctgtcgaaagagatgtataaatcaattactctgtaaattgcccacagattcagagttggctcctaggagctgatgctgccattgtcgacatctgatatttgaaaaaacagggtctgcaatcacctgacagtgtaaagaaaacctcccatctttatgtagctgacagggacttcgggcagaggagaacataactgaatcttgtcagtgacgtttgcctccagctgcctgacaaataagtcagcagcttatacccacagaagccagtgccagttgacgctgaaagaatcaggcaaaaaagtgagaatgaccttcaaactaaatatttaaaataggacatactccccaatttagtctagacacaatttcatttccagcatttttataaactaccaaattagtgaaccaaaaatagaaattagatttgtgcaaacatggagaaatctactgaattggcttccagattttaaattttatgtcatagaaatattgactcaaaccatattttttatgatggagcaactgaaaggtgattgcagcttttggttaatatgtctttttttttctttttccagtgttctatttgctttaatgagaatagaaacgtaaactatgacctaggggttttctgttggataattagcagtttagaatggaggaagaacaacaaagacatgctttccattttttcctttacttatctctcaaaacaatattactttgtcttttcaatcttctacttttaactaataaaataagtggattttgtattttaagatccagaaatacttaacacgtgaatattttgctaaaaaagcatatataactattttaaatatccatttatcttttgtatatctaagactcatcctgatttttactatcacacatgaataaaggcctttgtatctttctttctctaatgttgtatcatactcttctaaaacttgagtggctgtcttaaaagatataaggggaaagataatattgtctgtctctatattgcttagtaagtatttccatagtcaatgatggtttaataggtaaaccaaaccctataaacctgacctcctttatggttaatactattaagcaagaatgcagtacagaattggatacagtacggatttgtccaaataaattcaataaaaaccttaaaaaaaaaaaaaaaaaaaaaa

SEQ ID NO: 24 - DNA, 4535 bp, Homo sapiens
agccatcacccggcagcctcttgtccagcgctgacccttgggcccagcccgagcaaggaccgcagcaaacatgggtgacatgaccaacagcgacttttactccaaaaaccaaagaaatgagtcgagccatgggggcgagttcgggtgcacaatggaggagctccgctccctcatggagctgcggggcactgaggctgtggtcaagatcaaggagacttatggggacaccgaagccatctgccggcgcctcaaaacctcacctgttgaaggtttgccgggcaccgctccagacctggaaaagagaaagcaaatttttgggcaaaactttatacctccaaagaagccaaaaaccttcctgcagctcgtgtgggaggcgctgcaggacgtgacgctcatcatcctggagattgccgccatcatctccctggggctgtccttctaccacccgcccggcgagggcaacgaaggatgtgcgacggcccagggtggggcagaggatgaaggagaggcagaggcaggttggatcgagggggccgccattctcctctcagttatctgtgtggtcctggtcacggccttcaatgactggagcaaagagaaacagttccggggcctgcagagccgcatcgagcaggaacagaaatttaccgtggtccgggctggccaggtggtgcagatccctgtggctgagatcgtggttggggacatagcccaggtcaaatatggtgacctcctccctgccgacggcctcttcatccagggcaatgacctcaagattgatgaaagctccctaactggagagtctgaccaggtgcgcaagtccgtggacaaggaccccatgctgctgtcaggaacccacgtgatggagggctcaggacggatgttggtgactgctgtgggtgtgaactctcagactggcatcatctttaccctcctgggggctggtggtgaagaggaagagaagaaagacaaaaaaggtgtgaagaagggggatggccttcagctaccagcagcagacggtgcggcagcttcaaacgctgcagatagtgcgaatgccagcctagtcaatggtaaaatgcaggatggcaatgtggacgccagccagagcaaagccaaacaacaggacggggcagccgccatggagatgcagcccctcaagagtgccgagggcggcgacgctgacgacaggaagaaggccagcatgcacaagaaggagaagtccgtgctgcagggcaagctcaccaagctggctgtgcagatcgggaaggcgggcttggtgatgtcagccatcacggtgatcatcctggtgctctacttcactgtggacaccttcgtggtcaacaagaagccgtggctgcctgagtgcacgcccgtctacgtgcagtactttgtcaagttcttcatcattggcgtgacggtgctggtggtcgccgtgcccgaggggctccctctggccgtcaccatctcgttggcctattcggtgaagaaaatgatgaaggacaacaacctggtacgccacctggatgcctgtgagaccatgggcaatgccacagccatctgctcagacaagacaggcacgctgaccaccaatcgcatgacagtggtacaggcctatgtcggcgacgtccactataaagagatccccgaccccagctccatcaacaccaagaccatggagctgctgatcaatgccatcgccatcaacagcgcctacaccaccaagattctgcccccagagaaggagggcgccctgcctcggcaggtgggcaacaagacggagtgcggcctgctgggcttcgtgctggacctgaagcaggactacgagcccgtgcgcagccagatgccagaggagaagttgtacaaagtgtacaccttcaactccgtgcgcaagtccatgagcactgtcatcaagctgcccgacgagagcttccgcatgtacagcaagggggcttctgagatcgtgctcaagaagtgctgcaaaatcctcaatggggcgggagagcctcgtgtcttccggccccgcgaccgggacgagatggtaaagaaggtgattgagcccatggcttgcgatgggctccgcactatctgcgtggcctaccgcgacttccccagcagcccggagccggactgggacaatgagaatgacatcctcaacgaactcacctgcatctgcgtggtgggcatcgaggacccggtgcggccagaggtcccagaagccatccgcaagtgccagcgggcaggcatcacggtccgcatggtcactggcgacaatatcaacacggctcgggccatcgccatcaagtgtggcatcatccatcctggggaggactttctgtgcctcgagggcaaggagttcaacaggaggatccgcaacgagaagggggagattgagcaggagcgaattgacaagatctggccaaagctgcgggtgctggctcgctcctccccaacggacaagcataccctggttaaaggcatcatcgacagcacacacactgagcagcggcaggtggtggccgtgacgggggacgggaccaacgacgggcctgcactcaagaaggccgacgtgggcttcgccatgggcatcgcaggcactgacgtggccaaggaggcctcagacatcatcctgacagacgacaatttcagcagcatcgtcaaggcagtgatgtggggccgcaacgtctatgacagcatctccaaattcttgcagttccagctcaccgtcaacgtggtggccgtgattgtggccttcacaggcgcctgcatcacgcaggactcccctctgaaggccgtgcagatgctctgggtgaacctcatcatggacacgtttgcctcgctggcactggccactgagccgcccacggagaccctgctgctgaggaagccgtacggccgcaacaagccgctcatctccaggaccatgatgaagaacatcctgggccatgctgtctaccagcttgccctcatcttcaccctgctctttgttggcgagaagatgttccagatcgacagcgggaggaacgcgcccctgcattcgccaccctcagaacattacaccatcatcttcaacaccttcgtcatgatgcagctcttcaacgagatcaacgcccgcaagatccacggcgagcgcaatgtctttgacggcatcttccggaaccccatcttctgcaccatcgtgctgggcacctttgccatccagatagtgatcgtgcagtttggagggaagccattcagctgctctccactgcagctggaccagtggatgtggtgcatattcattgggttaggagagctcgtttggggccaggtcatcgccaccatcccgaccagcagactcaagttcctcaaggaggcaggcaggctcacacagaaggaggagatcccggaggaggagctcaacgaggacgtggaggagatcgaccacgcggagcgggagctgcggcggggccagatcctgtggttccgaggcctgaatcggatccagacacagatccgcgtcgtgaaggcgttccgtagctctctctatgaaggtttagaaaagcctgaatctcgaacctccatccataacttcatggctcatcctgaattccggatcgaagattcccagccccacatccccctcattgatgacaccgacctggaagaagatgccgcgctcaagcagaactcgagcccgccgtcatccctcaacaagaacaacagcgccatcgacagtgggatcaacctgacgaccgacacaagcaaatcagctacctcttcaagtccagggagccccatccacagcctggagacgtcgctttagctgaggaccctctcgcctgcccgcccgccctcatggaccccgctgccacccgctttccgggcacccatccatccaggcacccaactcacccaagcagcaacgagcaacaatcggaaaccaaatactggagagaaaaccaacgtttccacccacagaccctttctctggctgcgatgctgtttgaactctttttcacttcaaggcaaggggcgggatctccactgggggcttacgggagtgagcggttttccaaaacaagcccttcctggctcccacccagacatggaccagccatgcacccgcccagccaccacgtccccgcatgaatgtactgtcacatttcaatcctcccttgtttggtttttgggggttggggaggggtttttgtttgtttgtttgttttcttaggcgggaactgcaaacagactcttttctgagactatttatccaatccactggtctgtgagtttttgaaaatgcttgcacagcatggtctcagttgtatagattaatttaataactttttgaaattgcagagcttaactcgcctagtagatttgcaccaatggaaccgaagaacttcatagacactcacaaggttatatccatttctttgtatctatatcaacgtatacttttccgagactgtatacgtccatatagataggtagatatatatatatatatataaatatatatacatggatataaaaaaaaaaaaaaaaaggaattc

SEQ ID NO: 25 - DNA, 4898 bp, Homo sapiens
gaattccggctgccaggggcgtccggttacatccccgccttcctctgtcctggccgcgggaccgggtttgcgggaccgcagttcgggaacatgttggcctcgagcagccggatccgggctgcgtggacgcgggcgctgctgctgccgctgctgctggcggggcctgtgggctgcctgagccgccaggagctctttcccttcggccccggacagggggacctggagctggaggacggggatgacttcgtctctcctgccctggagctgagtggggcgctccgcttctacgacagatccgacatcgacgcagtctacgtcaccacaaatggcatcattgctacgagtgaacccccggccaaagaatcccatcccgggctcttcccaccaacattcggtgcagtcgcccctttcctggcggacttggacacgaccgatggcctggggaaggtttattatcgagaagacttatccccctccatcactcagcgagcagcagagtgtgtccacagagggttcccggagatctctttccagcctagtagcgcggtggttgtcacttgggaatccgtggccccctaccaagggcccagcagggacccagaccagaaaggcaagagaaacacgttccaggctgttctagcctcctctgattccagctcctatgccattttcctttatcctgaggatggtctgcagttccatacgacattctcaaagaaggaaaacaaccaagttcctgccgtggttgcattcagtcaaggttcagtgggattcttatggaagagcaacggagcttataacatatttgctaatgacagggaatcaattgaaaatttggccaagagtagtaactctgggcagcagggtgtctgggtgtttgagattgggagtccagccaccaccaatggcgtggtgcctgcagacgtgatcctcggaactgaagatggggcagagtatgatgatgaggatgaagattatgacctggcgaccactcgtctgggcctggaggatgtgggcaccacgcccttctcctacaaggctctgagaaggggaggtgctgacacatacagtgtgcccagcgtcctctccccgcgccgggcagctaccgaaaggccccttggacctcccacagagagaaccaggtctttccagttggcagtggagacttttcaccagcagcaccctcaggtcatagatgtggatgaagttgaggaaacaggagttgttttcagctataacacggattcccgccagacgtgtgctaacaacagacaccagtgctcggtgcacgcagagtgcagggactacgccacgggcttctgctgcagctgtgtcgctggctatacgggcaatggcaggcaatgtgttgcagaaggttccccccagcgagtcaatggcaaggtgaaaggaaggatctttgtggggagcagccaggtccccattgtctttgagaacactgacctccactcttacgtagtaatgaaccacgggcgctcctacacagccatcagcaccattcccgagaccgttggatattctctgcttccactggccccagttggaggcatcattggatggatgtttgcagtggagcaggacggattcaagaatgggttcagcatcaccgggggtgagttcactcgccaggctgaggtgaccttcgtggggcacccgggcaatctggtcattaagcagcggttcagcggcatcgatgagcatgggcacctgaccatcgacacggagctggagggccgcgtgccgcagattccgttcggctcctccgtgcacattgagccctacacggagctgtaccactactccacctcagtgatcacttcctcctccacccgggagtacacggtgactgagcccgagcgagatggggcatctccttcacgcatctacacttaccagtggcgccagaccatcaccttccaggaatgcgtccacgatgactcccggccagccctgcccagcacccagcagctctcggtggacagcgtgttcgtcctgtacaaccaggaggagaagatcttgcgctacgctttcagcaactccattgggcctgtgagggaaggctcccctgatgctcttcagaatccctgctacatcggcactcatgggtgtgacaccaacgcggcctgtcgccctggtcccaggacacagttcacctgcgagtgctccatcggcttccgaggagacgggcgaacctgctatgatattgatgaatgttcagaacaaccctcagtgtgtgggagccacacaatctgcaataatcacccaggaaccttccgctgcgagtgtgtggagggctaccagttttcagatgagggaacgtgtgtggctgtcgtggaccagcgccccatcaactactgtgaaactggccttcataactgcgacataccccagcgggcccagtgtatctacacaggaggctcctcctacacctgttcctgcttgccaggcttttctggggatggccaagcctgccaagatgtagatgaatgccagccaagccgatgtcaccctgacgccttctgctacaacactccaggctctttcacgtgccagtgcaaacctggttatcagggagacggcttccgttgcgtgcccggagaggtggagaaaacccggtgccagcacgagcgagaacacattctcggggcagcgggggcgacagacccacagcgacccattcctccggggctgttcgttcctgagtgcgatgcgcacgggcactacgcgcccacccagtgccacggcagcaccggctactgctggtgcgtggatcgcgacggccgcgaggtggagggcaccaggaccaggcccgggatgacgcccccgtgtctgagtacagtggctcccccgattcaccaaggacctgcggtgcctaccgccgtgatccccttgcctcctgggacccatttactctttgcccagactgggaagattgagcgcctgcccctggagggaaataccatgaggaagacagaagcaaaggcgttccttcatgtcccggctaaagtcatcattggactggcctttgactgcgtggacaagatggtttactggacggacatcactgagccttccattgggagagctagtctacatggtggagagccaaccaccatcattagacaagatcttggaagtccagaaggtatcgctgttgatcaccttggccgcaacatcttctggacagactctaacctggatcgaatagaagtggcgaagctggacggcacgcagcgccgggtgctctttgagactgacctggtgaatcccagaggcattgtaacggattccgtgagagggaacctttactggacagactggaacagagataaccccaagattgaaacttcctacatggacggcacgaaccggaggatccttgtgcaggatgacctgggcttgcccaatggactgcacttcgatgcgttctcatctcagctctgctgggtggatgcaggcaccaatcgggcggaatgcctgaaccccagtcagcccagcagacgcaaggctctcgaagggctccagtatccttttgctgtgacgagctacgggaagaatctgtatttcacagactggaagatgaattccgtggttgctctcgatcttgcaatttccaaggagacggatgctttccaaccccacaagcagacccggctgtatggcatcaccacggccctgtctcagtgtccgcaaggccataactactgctcagtgaacaatggcggctgcacccacctatgcttggccaccccagggagcaggacctgccgttgccctgacaacaccttgggagttgactgtatcgaacggaaatgaagacaagagtgccttatttcctttccaagtatttcacagcaacactctacttgaagcaacttggtccagattgaaaagtgtcctctggctgagtggccactaggcccagacccagcccagcctgagccccaacaacaacttttccctcactgttccccaaaacatgcaccctggacttctctaatagaaaagtctccacccctacacaaggacagaaccctccacccctacccccaaccctcagacagacttatacacccctgagtgaggattacatgcccatcccagtgtcctaggaccttttcccaatactagccccccagtggtgaacagaacctcccaaatttgagttgcacccttccctgtggccttatgagctcagcctcgctttgaggtacccaccgtcctgtcagctccttgacctatgagctggggcctgactaggaaaagttgggagttaaggaggaaattagcattccttaatgttttgttttggtgctctgaatttcttctttattatagtcctatagttttactcctcagttcctcaccatcatcatcttgtctaagacccccattataatattcatgcgctgctttttcatcaaaacctaccctgtcctagagatctatgggcatttggtggatgataatgagcagcccctcccagatagaatgtcaatatttgagcagtaggatattggcatttgttagttaaaggcttaaatcaaaagaatgtccaatggtaggaatttcaaggtgtaggtcagatatttgagaataggggatttttttgatgtgccttaaattataccaaagattactaattattcctctttgcccaaaatacttgcatccaaggttctagtctctgttgctgtgctggtctttagccccactgctggcactgatgtccctcctttttcacggagacctatctgaggtacaggatggggctggcaccagatgatgtcccaccacagtccctcacctccggcctccacatgacagaaccaatttacactcaaccatgacctcacccctccttggtttctccctccccg

SEQ ID NO: 26 - DNA, 462 bp, Homo sapiens
ctccagctccatgaccctagtggctatctggctgaagctgacctctcctacacctgggactttggagacagtagtggaaccctgatctctcgggcacttgtggtcactcatacttacctggagcctggcccagtcactgcccaggtggtcctgcaggctgccattcctctcacctcctgtggctcctccccagttccaggcaccacagatgggcacaggccaactgcagaggcccctaacaccacagctggccaagtgcctactacagaagttgtgggtactacacctggtcaggcgccaactgcagagccctctggaaccacatctgtgcaggtgccaaccactgaagtcataagcactgcacctgtgcagatgccaactgcagagagcacaggtatgacacctgagaaggtgccagtttcagaggtcatgggtaccacactggcagagatgtcaactcca

SEQ ID NO: 27 - DNA, 2542 bp, Homo sapiens
gaactccgcctcatgcaggatgcccagggctcggaagcagtaaggaggatgctacagaaaggaactgcagaaagaaaaaaagccacatggttaacttttcccctggagggcaaaggggtccggctctcaaaaagaaaagccaggcacagatcccaacaccaagtgtaaggcagcacaaagtgggtctgaaaccccaggaccgggtcaaaggccttccgaaggcccgaggttcttgaggaggaggggaagctgatagggccctggtctttctgcaccagcgtggctctttaaaatacaaaacacccacaaagccaaaaaccctgaaacatgttctttagctaaccccttccctgcccagatgcctgcaattctgagaattcacttcagttttgccagatccaacccctaggcttgagggtggagagccaggcctcctcagggtcccttctaggctcccaggcccaccttaggctttaattgcattggctgtttcttatggtgttagtgaattttgcaaagaaagccctgagcattgcataaatgcttgggggcgtgtcatttaaatggaagttctccaatagtggctgaaggcagagtttactgttatccctccctcttgctggctttgctggagggcttttatcagagagattggaggtgggagagcacttttaaagcacaccccaccccctgcacccgagcggcacctaagcttcccagagaccatgaccttgtatgtggctggaggcctcaggcttagggagcagcctgaagcctttgctgtcaaccctcccaggaaagaagccgggcctcaggctgaggaaaaacagagtttcctctccagagggctcaatgagcagccgggtagtggcctcgggcagtcctcaccagggggacacctccctgctttgcattaactcatcagcaagctcatcgagagctaacgtgggcccagcagtcctgtgcttggaaatgatgccgtcacctccacactcctgctgttccagcctctgcaggtgaagctgcaaggtgagcagaggcaggcgtggggacacactcttcaaggactgcactgccccttctccctcctgagagctctgtgcactgggtttggggatgaggcgccagcctggtcaggggaggtgactgtggtccttctgaccagcttggatctttaaaataatcacaaaaaagctcagcctgagcaggtgggtgcaaggctcaggggcctgtgtttttcatcaatcagttttcttcctgcaagattcttagagctggatgttcacgggatcatggggcatggaggtggtcacgctcagacagtcatgcaccaccctcaatcccaggccctgcagagataggaagaatcccaaccagagggattcttccccaaacgttcccttgtggcccaagagtgagttccggcctgagtgctgttatgactgccggcgtctctccgactgcctctcgcctcagtttaaccatctataggttaggaacaaagaagggcttaggcagccatcgtttccccatttctgtcagagccaagggcttggaggcccagccccatccgggcaagggctgtccgctcctgcccaggcctcacctcctcgctgcagctggcaagattctttctagcagaacagaaacactggcccccaattccactctcccctcctgatgctaccgcagagggcagaaaggtgccctgtagcgtccaccatgtgtgtgtcctgagtttccagtgcaagtcatctggatttgcatttagctagggaaactcggccctcaaaccctctccctctctgcctgaatttgccaaaatgccaaccatccgggcaggtgtggatgccacagtccatccccattgcatttcacccccacatggacagaggcacacactcgcacacattcccagcacctttgactgctgggggatgcaggccagggtctgcctggagcctcagggttgggacttatctccaaaggagcccacaccccctcttccaggatgggcactggctggcagcacttttttccctcatcacatccctgacccctgcccagcccacatgcacatgctgtttcctgtctccagggccctagcctgtggatctcttcctcccatgcactcctagggtgaatgggctcagcaccaaacctggctgtgcccattccccacaaccccagcttggcctcctgtgggaaggagaaggcagacctgcccagaggagaggggcagtgttcccacccacctgctccagcacaggaaccagggaggaaagaagggagagggaggttccattcaccgtcttctgggttagcgcttgattggatgtttcaagcaagggacaaggtgatggtggctgtaataggctcctcgtgggcaccgtcaccccagaaggcctgggcacccatgagaacctgtggccagcccttttcattggctgagttccctgctgttgtgcgtggtgccattttttttttaaacaacatatataaaaacaaaacaactggtaaaaaaaaaaaaaaaaaaaaaaaa

SEQ ID NO: 28 - DNA, 3287 bp, Homo sapiens
agactgaggcggaggcagccccgcgccgcgccggacccgagcatatttcattttctgtcattggactttgagccattagaaccatgagcaactacagtgtgtcactggttggcccagctccttggggtttccggctgcagggcggtaaggatttcaacatgcctctgacaatctctagtctaaaagatggcggcaaggcagcccaggcaaatgtaagaataggcgatgtggttctcagcattgatggaataaatgcacaaggaatgactcatcttgaagcccagaataagattaagggttgtacaggctctttgaatatgactctgcaaagagcatctgctgcacccaagcctgagccggttcctgttcaaaagggagaacctaaagaagtagttaaacctgtgcccattacatctcctgctgtgtccaaagtcacttccacaaacaacatggcctacaataaggcaccacggccttttggttctgtgtcttcaccaaaagtcacatccatcccatcaccatcgtctgccttcaccccagcccatgcgaccacctcatcacatgcttccccttcacccgtggctgccgtcactcctcccctgttcgctgcatctggactgcatgctaatgccaatcttagtgctgaccagtctccatctgcactgagcgctggtaaaactgcagttaatgtcccacggcagcccacagtcaccagcgtgtgttccgagacttctcaggagctagcagagggacagagaagaggatcccagggtgacagtaaacagcaaaatggcccaccaagaaaacacattgtggagcgctatacagagttttatcatgtacccactcacagtgatgccagcaagaagagactgattgaggatactgaagactggcgtccaagaactggaacaactcagtctcgctctttccgaatccttgcccagatcactgggactgaacatttgaaagaatctgaagccgataatacaaagaaggcaaataactctcaggagccttctccgcagttggcttccttggtagcttccacacggagcatgcccgagagcctggacagcccaacctctggcagaccaggggttaccagcctcacaactgcagctgccttcaagcctgtaggatccactggcgtcatcaagtcaccaagctggcaacggccaaaccaaggagtaccttccactggaagaatctcaaacagcgctacttactcaggatcagtggcaccagccaactcagctttgggacaaacccagccaagtgaccaggacactttagtgcaaagagctgagcacattccagcagggaaacgaactccgatgtgcgcccattgtaaccaggtcatcagaggaccattcttagtggcactggggaaatcttggcacccagaagaattcaactgcgctcactgcaaaaatacaatggcctacattggatttgtagaggagaaaggagccctgtattgtgagctgtgctatgagaaattctttgcccctgaatgtggtcgatgccaaaggaagatccttggagaagtcatcaatgcgttgaaacaaacttggcatgtttcctgttttgtgtgtgtagcctgtggaaagcccattcggaacaatgtttttcacttggaggatggtgaaccctactgtgagactgattattatgccctctttggtactatatgccatggatgtgaatttcccatagaagctggtgacatgttcctggaagctctgggctacacctggcatgacacttgctttgtatgctcagtgtgttgtgaaagtttggaaggtcagacctttttctccaagaaggacaagcccctgtgtaagaaacatgctcattctgtgaatttttgaaagtcaacagttcaggagaagagaaggaatttgaagagaaaaaggaaaattaaaattactaattaatttttagattcaatatttatatggagttttgaaaaataatagtggccctgaaggaataaattccagctttaaaaaccaagtctgaggaaatatttggcttcataaagtaaagagacggtttggcatttattattactttttcctgtattttatgcccataaaataagctttataaaaaccaatttcctgatggactattaaattcatcttagaataaattagtgaagaatttaattttagaataaataatccaatctgaaataattataccttctttccttgttaggtagttatgagtaaatctgcaaaaggcaatgaaaatgccttaaattttatcaataacagaattattgtatttaaaaaaaaactaatacttatctttaaaatagtaaataggattttaaacagagaattttatcagtaataggtgtcagtttttaaaaaattgcttgtaggctgagcgcggtggctcacgcctgtaatcccagcactttgggaggccaaggtgggtggaccacatgaggtcaggagtttgagatcagcctggccaacatggtgaaaccccatctctactaaaaatacaaaaattagccggacgcagtggcacgcgcctgtaatcccagctactcaagaggctgaggcacgagaatcacttgaacccgggagggagaggttgcagtgagccaagatcgtaccactgcactccagcctgggtgacagagtgagactccgtctccaaaaaaaaactttgcttgtatattatttttgccttacagtggatcattctagtaggaaaggacaataagattttttatcaaaatgtgtcatgccagtaagagatgttatattcttttcttatttcttccccacccaaaaataagctaccatatagcttataagtctcaaatttttgccttttactaaaatgtgattgtttctgttcattgtgtatgcttcatcacctatattaggcaaattccattttttcccttgcgctaaggtaaagatttaattaaataattttggcctctcatagttttctctctctttaaagagaataaatagagggccaggtgtggtggctcacgcctgtgatcccagcactttgggaggccaagacgggcggatcatgaggtcaagagatcaagatcatcctggccaacatggtgaaaccctgtctctactaaaaatacaaaaatgagctgggcatggtggggcgtgcctgtagtcccatgtacttgggaggctgaggcaggaaaattcttgaacccaggagacggaagttgcagtgagctgagatcacaccactgcactccagcctggtgacagagcaagactccggctctt

SEQ ID NO: 29 - DNA, 2255 bp, Homo sapiens
cctgacgcagtgtcttgggcgctaacggcggcggcggccttgtgtttagactccagaactccccacttgccgcgttctcgccgccgcaggctcccgggacgatggtgccccgcctgctgctgcgcgcctggccccggggccccgcggttggtccgggagcccccagtcggcccctcagcgccggctccgggcccggccagtacctgcagcgcagcatcgtgcccaccatgcactaccaggacagcctgcccaggctgcctattcccaaacttgaagacaccattaggagatacctcagtgcacagaagcctctcttgaatgatggccagttcaggaaaacagaacaattttgcaagagttttgaaaatgggattggaaaagaactgcatgagcagctggttgctctggacaaacagaataaacatacaagctacatttcgggaccctggtttgatatgtacctatctgctcgagactccgttgttctgaactttaatccatttatggctttcaatcctgacccaaaatctgagtataatgaccagctcacccgggcaaccaacatgactgtttctgccatccggtttctgaagacactccgggctggccttctggagccagaagtgttccacttgaaccctgcaaaaagtgacactatcaccttcaagagactcatacgctttgtgccttcctctctgtcctggtatggggcctacctggtcaatgcgtatcccctggatatgtcccagtattttcggcttttcaactcaactcgtttacccaaacccagtcgggatgaactcttcactgatgacaaggccagacacctcctggtcctaaggaaaggaaatttttatatctttgatgtcctggatcaagatgggaacattgtgagcccctcggaaatccaggcacatctgaagtacattctctcagacagcagccccgcccccgagtttcccctggcatacctgaccagtgagaaccgagacatctgggcagagctcaggcagaagctgatgagtagtggcaatgaggagagcctgaggaaagtggactcggcagtgttctgtctctgcctagatgacttccccattaaggaccttgtccacttgtcccacaatatgctgcatggggatggcacaaaccgctggtttgataaatcctttaacctcattatcgccaaggatggctctactgccgtccactttgagcactcttggggtgatggtgtggcagtgctcagattttttaatgaagtatttaaagacagcactcagacccctgccgtcactccacagagccagccagctaccactgactctactgtcacggtgcagaaactcaacttcgagctgactgatgccttaaagactggcatcacagctgctaaggaaaagtttgatgccaccatgaaaaccctcactattgactgcgtccagtttcagagaggaggcaaagaattcctgaagaagcaaaagctgagccctgacgcagttgcccagctggcattccagatggccttcctgcggcagtacgggcagacagtggccacctacgagtcctgtagcactgccgcattcaagcacggccgcactgagaccatccgcccggcctccgtctatacaaagaggtgctctgaggcctttgtcagggagccctccaggcacagtgctggtgagcttcagcagatgatggttgagtgctccaagtaccatggccagctgaccaaagaagcagcaatgggccagggctttgaccgacacttgtttgctctgcggcatctggcagcagccaaagggatcatcttgcctgagctctacctggaccctgcatacgggcagataaaccacaatgtcctgtccacgagcacactgagcagcccagcagtgaaccttgggggctttgcccctgtggtctctgatggctttggtgttgggtatgctgttcatgacaactggataggctgcaatgtctcttcctacccaggccgcaatgcccgggagtttctccaatgtgtggagaaggccttagaagacatgtttgatgccttagaaggcaaatccatcaaaagttaacttctgggcagatgaaaagctaccatcacttcctcatcatgaaaactgggaggccgggcatggtgctcatgcctgtaatcccagcattttgagaggctgaggcgggtggatcacttgaggtcaggagtttgagaccaacctggccaacatggtgaaaccttgtctctactaaaaatg

SEQ ID NO: 30 - DNA, 460 bp, Homo sapiens
  misc_feature (1)..(460): where n may be a or g or c or t/u, unknown, or other
ngtaatcgcccagccagaagagggctctgaaagacagcccatccccaggatgataatgctggattcagacaccacaanacaagagaacccagactctggacatggagcagtaccagtgtgaaagacttttcccaccgacatggtcacatagccattctccttgaagtactgggggatggtggagaagtttccagcgtgcaccctccagtaggagttgaagtcgtacaggcgggtggtgtcaggtctcctgccagtgaggaaagaaacgcggctcggggcgcacactgcttgctgttagggagcagaagcagaggtaagcatcgccacagcaaaacatgtctgccatctcttaggtaaccaagcaaccgccctcccgaggctcctagcaaacagcttggtagctgagtcatgcagagctcaaaccagacactgggatttgggtgtcacctaggcaacagac

SEQ ID NO: 31 - DNA, 335 bp, Homo sapiens
tttttttttttttttttccagaaatgggttttattctcagccgagggacagcaggactggtagaaactgtcaggccacacggctgcctgcacagcacccccatgcttggtagggggtgggagggatggcgggggctggctgtccacaggccgggcatgacaaggaggctcactggaggtggcacactttggagtgggatgtcgggggacagcgttctctggtagttgggccacaagactccacaaggatagcacagtgactgattcccaccgctaaaggcgaggcggttggccatgtgtaggtgtgtatatatatgactatttatagatatttat

SEQ ID NO: 32 - DNA, 521 bp, Homo sapiens
cccaacgccgtcgtcatcgtggaggacgccaaagtcaagcagaggattgattacgccaacctgaccggaatctctgtcagcagcctgagcgacagtctttttgtgcttcatgtacagcgtgcggacaataagcaaaagggagatgtggtgctgcagagtgaccacgtgattgagacgctgaccaagacagccctcagtgccaaccgcgtgaacagcatcaacatcaaccagggcagcatcacgtttgcagggggccccggcagggatggcaccattgacttcacacccggctcggagctgctcatcaccaaggccaagaacgggcacctggctgtggtcgccccacggctgaattctcggtgataaaggcgcccactggaccctcccaacgcccaatgctttgcttttctcctcctccccttcccagttaccaaagactcgaacttccagacagggacccagggacaccccgaagcccacctgcaatctcccacctcctgcccatccctctcttgagggac

SEQ ID NO: 33 - DNA, 676 bp, Homo sapiens
gcacatgtgcacacacaagtaagatggcttcagagagggagaagcactgtgaggcctccagaggatgtggcagtgagggacgatggggtgaagtcagctgggcattcaaagaagctagactgagaacgcctgagaagaaccagctacgggaagagctttgggaagcaaaggcagaggccctggggtgggagcaggcttgttttattggaaggaccagaaaactggtaagtgtgacccagatcaagtgtgaggagatgaggctggggatagtcaggggctggatcacccagggccttgtgggccccacatagggttttgggttttattctcagggcaatgggaagctgttggatggtttgatgaaggggagtgacaggatccgatgtacctatttaagaatttaagagggtcgggtgcggtggctcatgcctataatcctagcactttgagaggccaaggtgggctgatcacaaggtcaagagttcgtgaccagcctggccaatatggtgaaaccccatgtctactaaaaatacaaaaattagctgggcatggtggcacacacttgtagtccgagctactcgggaggctgaggcagaagaatcgcttgaacccagaagcggaggttgagtgagctcagattgggtcatggactccaactgggtggagcgtccactcc

SEQ ID NO: 34 - DNA, 1427 bp, Homo sapiens
attaacccaggagatgggggtcgaggagagaccccggggagtagagagagagaaactcactccccgagtccccgaccctccccaagcaaggttataatataacttatcctctcatgcttttttcctgccccttctccccaaatcatcaacaatagaagaagaagaaaacatgtcaggacacaaatgcagttatccctgggacttacaggatcgatatgctcaagataagtcagttgtaaataagatgcaacagaaatattgggagacgaagcaggcctttattaaagccacagggaagaaggaagatgaacatgttgttgcctctgacgcggacctggatgccaagctagagctgtttcattcaattcagagaacctgtctggacttatcgaaagcaattgtactctatcaaaagaggatatgtttcttgtctcaagaagaaaacgaactgggaaaatttcttcgatcccaaggtttccaagataaaaccagagcaggaaagatgatgcaagcgacaggaaaggccctctgcttttcttcccagcaaaggttggccttacgaaatcctttgtgtcgatttcaccaagaagtggagacttttcggcatcgggccatctcagatacttggctgacggtgaaccgcatggaacagtgcaggacggaatatagaggagcactattatggatgaaggacgtgtctcaggagcttgatccagacctctacaagcaaatggagaagttcaggaaggtacaaacacaagtgcgccttgcaaaaaaaaactttgacaaattgaagatggatgtttgtcaaaaagtggatcttcttggagcgagcagatgcaatctcttgtctcacatgctagcaacataccagcttgcctgggaccagtggcagggaccccggaacctgaaggtgctgacaaagatgacctgctgctgttgagtgagatcttcaatgcttcctccttggaagagggcgagttcagcaaagagtgggccgctgtgtttggagacggccaagtgaaggagccagtgcccactatggccctgggagagccagaccccaaggcccagacaggctcaggtttccttccttcgcagcttttagaccaaaatatgaaagacttacaggcctcgctacaagaacctgctaaggctgcctcagacctgactgcctggttcagcctcttcgctgacctcgacccactctcaaatcctgatgctgttgggaaaaccgataaagaacacgaattgctcaatgcatgaatctgtacccttcgggagggcactcacatgccgcccccagcagctcccctgggggctagcagaagtataaagtgatcagtatgctgttttaataattatgtgccattttaataaaatgaaagggtcaacggccctgtttatattggtataaaaaaaaaaaa

SEQ ID NO: 35 - DNA, 607 bp, Homo sapiens
  misc_feature (1)..(607): where n may be a or g or c or t/u, unknown, or other
ttttaaaaatcttataaacttttattaaccaagttcagaaataattagaggggtgatctccctggatcagaactaaaacaagtgagatcaattaagctcctttgaaataggtctgtccacacttaatattcttttttagaccaatttagctggaaatctattacttaacccacattcattgatatcatagtcttgtcttatatttctttgccttaggcaggatttttctgtgattctgattgtgtctgactacaagctgaagatatcttaattaataacagggcaggaagaattgagtggggaaagaaggccttcggacagtagataagtatccaaagcagtgtgggcaaaaagagtaagcaacatcccctgggatttttcccatgtgggtatcactgagcaaagctgctgtgggaagatatgtagattaatgggaaatgcagggttattatggaggaaataactcacaggatgatttcatagcctggctaaattactacttgattaactcctgataaaactcagagcgcacaaagcgaggcagagaatccttttccatcanggcatggattcttttctgggccatgtcaaagctgctcagggaagg

SEQ ID NO: 36 - DNA, 408 bp, Homo sapiens
ggtactggattagatgaactctttgtgcaagttaccagtgctgccgaagaatatgaaagggagtatcgtcctgaatatgaacgtctgaaaaaatcactggccaacgcagagagccaacagcagagagaacaactggaacgccttcgaaaagatatgggttctgtagccttggatgcagggactgccaaagacagcttatctcctgtgctgcacccttctgatttgatcctgactcgaggaaccttggatgaagaggatgaggaagcagacagcgatactgatgacattgaccacagagttacagaggaaagccatgaagagccagcattccagaattttatgcaagaatcgatggcacaatacctgaagagaaacaataaataggagactttagcacacttcacttgt

SEQ ID NO: 37 - DNA, 1873 bp, Homo sapiens
gagactctgtctcaaaaaaaaaaaaaaagaagtcatggtcatggtaaaaaacctatggctttggaaggctttctcggtaacgtcctagaagaacgatgggacaaacgctgcctccctgactccactgggcagcagtgaactccgctccccaagaatcagttacctccactttttttaatcgtaacacctccatttgtattacatatggtgtatgggtattgatgaggtcatggtatcatatatgggatttttttctgtgtaaatcatcaagtataagaagaaactatgggactctgagccttgctttagagaatttacagtggacaaataggtgtcatcaaaccagtttttaatcattctgactcaagtgaaaacgctcagaatttcacactgtgaatccacgtttacaacccttacaggtgggccttcaggcctggttcgctacaacaatgtcttccacaactcaaactcccaccgcgctcacacaaccggtccactcctgccttttcactcacacagctcccgactgcttcttgcagaggctgagagtcccccccccaccttttttttcatttagatgtaacaaacctagtagtttatgttcatcaattgtctgtatatctctatattttatccatgtactcttttgatgtatagaagtagtttgaaactcattgtttccttgtggtaagtgaccgagatgctgccacaggacctgagacactgatgaatggtgctattttggactttcaacatgctccttggcgaggtagctctgatggagttattttttatttccatgttctaagaaggtgttggtactctgtttccctgaatgttgttctctagactggattgacttgttttccttgtgtcttcagtgtggctttcttcctcagtgttgtaggttgagcgaatgctaccagagtgtgagagaccattgtctcgttggctggcgctcacggacatgcagtcacggtagcgggagcaatcacaaaactgtaatttacttaccaaatctcttcctttccatagcctcgcctgcctgacttagagaaagaaaagcaataattttacaggcattttgaggtgtctctttctttgggttctttctgtttgaaaggatatttgtcgaaaaaaagagcaaaaccgttttaaataaactccccctggaaaaaaacccaaaacactggcatctgagtaggaatatgaaaatgacaccttttccaaatattaaattggaaaacaaggtctacaaaatcatgatacttttttaaaaggcagagcattcttttttcggcaattttgataagcaaggtgtagatttacatttttgtccttgctcccaacgaaatggataaacaaaaataacttaccatctactcatggaatgttgttgtgttagccagtctgaaagcccaccttaatttttatataactgtctttagctcttcttttgacagggcaggccttgttctgaactgtttcgcttctgactgttaaacaccgatgacgcatgcactgcacttcttcgttttcttcttgctcccccattggcctgagtttcttgtgcattactcctctccctccttcgttagaataggtatatcagctgtgtaaatagagcaagaaaacagtattctgcatctgtggcatttatgtagagttgcagttgtgtactgctgaaaatgcaggcttttgtaacagtgtgatctttactgatgcactcatgacaagtacccaatgtattttagctattttagtagtatttgttcaataaatacgcaagctgtaaggtaaaaaaaaaaaaaaaaaaaaaaaaaaaaaaaaaaaaaaaaaaaaaaaaaaaaaaaaaaaaaaaaaaaaaaaaaaa

SEQ ID NO: 38 - DNA, 1640 bp, Homo sapiens
gaggagcccggctgaggcgccagtacccggcccggtccgcatttcgccttccggcttcggtttccctcggcccagcacgccccggccccgccccagccctcctgatccctcgcagcccggctccggccgcccgcctctgccgccgcaatgatgatgatggcgctgagcaagaccttcgggcagaagcccgtgaagttccagctggaggacgacggcgagttctacatgatcggctccgaggtgggaaactacctccgtatgttccgaggttctctgtacaagagatacccctcactctggaggcgactagccactgtggaagagaggaagaaaatagttgcatcgtcacatggtaaaaaaacaaaacctaacactaaggatcacggatacacgactctagccaccagtgtgaccctgttaaaagcctcggaagtggaagagattctggatggcaacgatgagaagtacaaggctgtgtccatcagcacagagccccccacctacctcagggaacagaaggccaagaggaacagccagtgggtacccaccctgcccaacagctcccaccacttagatgccgtgccatgctccacaaccatcaacaggaaccgcatgggccgagacaagaagagaaccttccccctttgctttgatgaccatgacccagctgtgatccatgagaacgcatctcagcccgaggtgctggtccccatccggctggacatggagatcgatgggcagaagctgcgagacgccttcacctggaacatgaatgagaagttgatgacgcctgagatgttttcagaaatcctctgtgacgatctggatttgaacccgctgacgtttgtgccagccatcgcctctgccatcagacagcagatcgagtcctaccccacggacagcatcctggaggaccagtcagaccagcgcgtcatcatcaagctgaacatccatgtgggaaacatttccctggtggaccagtttgagtgggacatgtcagagaaggagaactcaccagagaagtttgccctgaagctgtgctcggagctggggttgggcggggagtttgtcaccaccatcgcatacagcatccggggacagctgagctggcatcagaagacctacgccttcagcgagaaccctctgcccacagtggagattgccatccggaacacgggcgatgcggaccagtggtgcccactgctggagactctgacagacgctgagatggagaagaagatccgcgaccaggacaggaacacgaggcggatgaggcgtcttgccaacacggccccggcctggtaaccagcccatcagcacacggctcccacggagcatctcagaagattgggccgcctctcctccatcttctggcaaggacagaggcgaggggacagcccagcgccatcctgaggatcggggtgggggtggagtgggggcttccaggtggcccttcccggcacacattccatttgttgagccccagtcctgccccccaccccaccctccctacccctccccagtctctggggtcaggaagaaaccttattttaggttgtgttttgtttttgtataggagccccaggcagggctagtaacagtttttaaataaaaggcaacaggtcatgttcaatttcttc

SEQ ID NO: 39 - DNA, 645 bp, Homo sapiens
tgcattgcagggggagagtgaactgacagactcagtcactgaatgagggaaaaggagtgagaagacaaagccgtcaaagccccaacagctttgtatttctccagcccggcgcagaccccggagctcccgaggcactccctccatctttggaacacgccagtaattgattgataacaggaagctatgagggaccctgtgagtagccagtacagttcctttcttttctggaggatgcccatcccagaactggatctgtcggagctggaaggcctgggtctgtcagatacagccacctacaaggtcaaagacagcagcgttggcaaaatgatcgggcaagcaactgcagcagaccaggagaaaaacctgaaggtgatggcctccttgagtacagcaccttcaacttctggagagctcccattgccagcatccactccttcgaactggacttgctctaaggccaagacttctctctcccatcacttgcacctcattgtcttccctctcaaggcccttcctttccagtcctttccatttaatcttgttcttctccctactggtgtgggggtgctgatgaatctgccacagttgagttcttatgtattgattgatctatcgtctactccatttatattcaaagcccctcaa

SEQ ID NO: 40 - DNA, 1509 bp, Homo sapiens
agacttggaaaccccaaagtgtccgcgaccctgcacggcagctcccttccagcttcatgggcaaagtgtggaaacagcagatgtaccctcagtacgccacctactattacccccagtatctgcaagccaagcagtctctggtcccagcccaccccatggcccctcccagtcccagcaccaccagcagtaataacaacagtagcagcagtagcaactcaggatgggatcagctcagcaaaacgaacctctatatccgaggactgcctccccacaccaccgaccaggacctggtgaagctctgtcaaccatatgggaaaatagtctccacaaaggcaattttggataagacaacgaacaaatgcaaaggttatggttttgtcgactttgacagccctgcagcagctcaaaaagctgtgtctgccctgaaggccagtggggttcaagctcaaatggcaaagcaacaggaacaagatcctaccaacctctacatttctaatttgccactctccatggatgagcaagaactagaaaatatgctcaaaccatttggacaagttatttctacaaggatactacgtgattccagtggtacaagtcgtggtgttggctttgctaggatggaatcaacagaaaaatgtgaagctgttattggtcattttaatggaaaatttattaagacaccaccaggagtttctgcccccacagaacctttattgtgtaagtttgctgatggaggacagaaaaagagacagaacccaaacaaatacatccctaatggaagaccatggcatagagaaggagaggtgagacttgctggaatgacacttacttacgacccaactacagctgctatacagaacggattttatccttcaccatacagtattgctacaaaccgaatgatcactcaaacttctattacaccctatattgcatctcctgtatctgcctaccaggtgcaaagtccttcgtggatgcaacctcaaccatatattctacagcaccctggtgccgtgttaactccctcaatggagcacaccatgtcactacagcccgcatcaatgatcagccctctggcccagcagatgagtcatctgtcactaggcagcaccggaacatacatgcctgcaacgtcagctatgcaaggagcctacttgccacagtatgcacatatgcagacgacagcggttcctgttgaggaggcaagtggtcaacagcaggtggctgtcgagacgtctaatgaccattctccatatacctttcaacctaataagtaactgtgagatgtacagaaaggtgttcttacatgaagaagggtgtgaaggctgaacaatcatggatttttctgatcaattgtgctttaggaaattattgacagttttgcacaggttcttgaaaacgttatttataatgaaatcaactaaaactatttttgctataagttctataaggtgcataaaacccttaaattcatctagtagctgttcccccgaacaggtttattttagt

SEQ ID NO: 41 - DNA, 1990 bp, Homo sapiens
gaattccgggggtattggcagctgaggagtggaggctgggcagctccgactccctgacgccagcgcgaccagatcaatccaggctccaggagaaagcaggcgggcgggcggagaaaggagaggccgagcggctcaacccgggccgaggctcggggagcggagagtggcgcaccgcccggccgtccggacccgggccgcgagaccccgctcgcccggccactcgtgctcccgcacggacgggcgcgccgccaacccggtgctgactgggttacttttttaaacactaggaatggtaatttctactcttctggacttcaaactaagaagttaaagagacttctctgtaaataaacaaatctcttctgctgtccttttgcatttggagacagctttatttcaccatatccaaggagtataactagtgctgtcattatgaatgtgacaagtttattttcctttacaagtccagctgtgaagagacttcttgggtggaaacagggcgatgaagaagaaaaatgggcagagaaagctgttgatgctttggtgaaaaaactgaagaaaaagaaaggtgccatggaggaactggaaaaggccttgagctgcccagggcaaccgagtaactgtgtcaccattccccgctctctggatggcaggctgcaagtctcccaccggaagggactgcctcatgtcatttactgccgtgtgtggcgctggcccgatcttcagagccaccatgaactaaaaccactggaatgctgtgagtttccttttggttccaagcagaaggaggtctgcatcaatccctaccactataagagagtagaaagccctgtacttcctcctgtgctggttccaagacacagcgaatataatcctcagcacagcctcttagctcagttccgtaacttaggacaaaatgagcctcacatgccactcaacgccacttttccagattctttccagcaacccaacagccacccgtttcctcactctcccaatagcagttacccaaactctcctgggagcagcagcagcacctaccctcactctcccaccagctcagacccaggaagccctttccagatgccagctgatacgcccccacctgcttacctgcctcctgaagaccccatgacccaggatggctctcagccgatggacacaaacatgatggcgcctcccctgccctcagaaatcaacagaggagatgttcaggcggttgcttatgaggaaccaaaacactggtgctctattgtctactatgagctcaacaatcgtgtgggtgaagcgttccatgcctcctccacaagtgtgttggtggatggtttcactgatccttccaacaataagaaccgtttctgccttgggctgctctccaatgttaaccggaattccactattgaaaacaccaggcggcatattggaaaaggagttcatctttattatgttggaggggaggtgtatgccgaatgccttagtgacagtagcatctttgtgcaaagtcggaactgcaactaccatcatggatttcatcctactactgtttgcaagatccctagtgggtgtagtctgaaaatttttaacaaccaagaatttgctcagttattggcacagtctgtgaaccatggatttgagacagtctatgagcttacaaaaatgtgtactatacgtatgagctttgtgaagggctggggagcagaataccaccgccaggatgttactagcaccccctgctggattgagatacatctgcacggccccctccagtggctggataaagttcttactcaaatgggttcacctcataatcctatttcatctgtatcttaaatggccccagcatctgcctctggaaaactattgagccttgcatgtacttgaaggatggatgagtcagacacgattgagaactgacaaaggagccttgataatacttgacctctgtgaccaactgttggattcagaaatttaaacaaaaaaaaaaaaaaaa

SEQ ID NO: 42 - DNA, 803 bp, Homo sapiens
ggcggcggcggcggtagccaggctgtggtggcgcgggatcttgggggcctcggcgctgaccagggggactgggcgaccctccgttctgttgctgccggtgaggcgggagagcgccggggccgacacgcgccccactgtcagaccacggaatgatgtggcccacaagcagctctcagcttttggagagtatgtggctgaaatcttgcccaagtatgtccaacaagttcaggtgtcctgcttcaatgagttagaggtctgtatccatcctgatggcgtcatcccagtgctgactttcctcagggatcacaccaatgcacagttcaaatctctggttgacttgacagcagtggacgtcccaactcggcaaaaccgttttgagattgtctacaacctgttgtctctgcgcttcaactcacggatccgtgtgaagacctacacagatgagctgacgcccattgagtctgctgtctctgtgttcaaggcagccaactggtatgaaagggagatctgggacatgtttggagtcttctttgctaaccaccctgatctaagaaggatcctgacagattatggcttcgagggacatcctttccggaaagactttcctctatctggctatgtttgagttacgttatgatgatgaagtgaagcgggtggtggcaggagccgggtggagttggccaagagttccgcaaattgacctgaacagccctgggaggcttcccagtctatcgccaaccccggagagtctcagcttgaagccggagacaagaagctgatgcaagtagtccacgaacagctgt

SEQ ID NO: 43 - DNA, 873 bp, Homo sapiens
tgctgatggtaatggcacaattgacttccctgaatttctgacaatgatggcaagaaaaatgaaagacacagacagtgaagaagaaattagagaagcattccgtgtgtttgataaggatggcaatggctatattagtgctgcagaacttcgccatgtgatgacaaaccttggagagaagttaacagatgaagaagttgatgaaatgatcagggaagcagatattgatggtgatggtcaagtaaactatgaagagtttgtacaaatgatgacagcaaagtgaagaccttgtacagaatgtgttaaatttcttgtacaaaattgtttatttgccttttctttgtttgtaacttatctgtaaaaggtttctccctactgtcaaaaaaatatgcatgtatagtaattaggacttcattcctccatgttttcttcccttatcttactgtcattgtcctaaaaccttattttagaaaattgatcaagtaacatgttgcatgtggcttactctggatatatctaagcccttctgcacatctaaaacttagatggagttggtcaaatgagggaacatctgggtaatgcctttttttacagtagtcttctttagggaactgtccagcatgttgtcgttgcaagtgtggacgttgtaactctgcgtgtgatatgggccaggtcaacaatatgttacttaaagtgcctatcgcaaacggcgtgttatccaggtctcctacctattttcggctggggtccgtaccaaacattcctttatggtatggtttacttgtaccctaaatggttggcatgccaaaccccagtgttttgtccaaaaatacttaaaaaaaaaaattcgcgcgcaataaatggggcaaagaaata

SEQ ID NO: 44 - DNA, 714 bp, Homo sapiens
tttccaaagatttattgaagcagaaccaagttggttggatacttgctggaaaaaaaaaagcagttttaatagtattcaaaataccttttaaaaagtattctagcacaagatttttctgtaaactagattatgttgtaaacttttttctaaatcttgtaggagtgtcggttgttaagaactagagcttattcctattccaaatctatcttgcgctcctgaaaaactgcagaaaggcacttgaaagctgtttctttaagatatggatttcttttttattcttgctggtaatatattgctgcactgagtgtgtgcaatttttattcaaggtcatcgtgatgctgagaagtttcgttgataacctgtccatctctagtttcaaccgtcttaatcagaagtgtcctttttgagtgggtatcaaccagagggagtgaatccagattagtttccctcaggttcagggaggaaaagtttggaagaggcagagaaatcctgctctcctcgccttccagcagcttcctgtaggtggcaatctcaatgtcaagggccatcttaacattgagcaggtcttggtattcacgaaggtgacgagccatttcctccttcatattctgaatctcatcctgcaggcggccaatagtgtcttggtagttagcagcttcaacggcaaagttctcttccatttcacgcatctggcgttccagggactcattggtt

SEQ ID NO: 45 - DNA, 2784 bp, Homo sapiens
aaacaaattgcgaaaagatgctagttctcaagactgctatgatattccacgagcatttccaagtgatagatctagttcacttgaaggcttccataaccactttaaagtcaaaaatgtgttgacagtgggaagtgtttcaagtgaagaactggatgaaaattacgtcccaatgaatcccaattcaccaccacgacaacattccagcagttttacagaaccaattcaggaagcaaattatgtgccaatgactccaggaacatttgatttttcctcatttggaatgcaagttcctcctcctgctcatatgggcttcaggtccagcccaaaaacccctcccagaaggccagttcctgttgcagactgtgaaccaccccccgtggataggaacctcaagccagacagaaaaggtcaaagtcctaaaattttaagactcaaaccccatggtttagagcgaactgattcacaaaccataggtgactttgctacaagaagaaaggtcaagccagcgcctttagaaataaaacctttgccagaatgggaagaattacaagccccagttagatctcccatcactaggagttttgctcgagactcttccaggtttcccatgtccccccgaccagattcagtgcatagcacaacttcaagcagtgactcacacgacagtgaagagaattatgttcccatgaacccaaacctgtccagtgaagacccaaatctctttggcagtaacagtcttgatggaggaagcagccctatgatcaagcccaaaggagacaaacaggtggaatacttagatctcgacttagattctgggaaatccacaccaccacgtaagcaaaagagcagtagctcaggcagcagtgtagcagatgagagagtggattatgttgttgttgaccaacagaagaccttggctctaaagagtacccgggaagcctggacagatgggagacagtccacagaatcagaaacgccagcgaagagtgtgaaatgaaaatattgccttgccatttctgaacaaaagaaaactgaattgtaaagataaatcccttttgaagaatgacttgacacttccactctaggtagatcctcaaatgagtagagttgaagtcaaaggacctttctgacataatcaagcaatttagacttaagtggtgctttgtggtatctgaacaattcataacatgtaaataatgtgggaaaatagtattgtttagctcccagagaaacatttgttccacagttaacacactcgtagtattactgtatttatgcactttttcatctaaaacattgttctgggttttcccaatgtaccttaccataattcctttgggagttcttgttttttgtcacactactttatataacaatactaagtcaactaagctacttttagatttggaaattgctgtttacagtctaacaacattaaaatgagaggtagattcacaagttagctttctacctgaagcttcaggtgataaccattagcttatacttggactcatcatttgttgccttccaaaatgctgaggataatgtatgtactggtgtcaggacctagttctctggttaatgtacatttagtttttaatggtggaactttgttatattttgttaattacagtgtttttggttcattgagtgaagattctgccgggtgggatcttgcacctttgaaagactgaataattacactaccaagtaagcctgcaaatcattgatggcatgcagtgatgatgtgctcttacacttgttaacatgtattaagtgttatttgcaaaaggtagattatgtaaccaatcaggtacgtaccaggcagtgatgtgctaatacactgatcaggtttagacaatgagctttggttgtgttcttgttagtcctaatattggttttcagtttggaattaataaagcagttgacattcactgttagttacagcaacatactgtgatttttaattagatagtaattcagatttattactctatgaaattctgtcttttgacaccatagtgccctttctatgattttttttacttaatattcttcttggccttatatttaattccctatgcaattaatattttatatctgcattttttttaaaaaaatagatgttatataagtgattctcgtatgtagcacctgttgcttttccactgaaagaattacggattttgtactgtgatttatattcactgccccaattcaagaaatattggagccttgctacaatgtgaaatgttatagtcatggactccttccaaccagatttctgaaaacaccagagggatggtataattctgtctcacctataacatggtcctgtgacatagatattaagaccacaagttgtagtgaggctacaattatattcgtctgtcttggctttgcaacataatttagaaagcacgtatagttgttttttaaccaagttacatacaatctcatgtactgatttgagacttataacaatttttggagggggcatagagaaaggagtgcccacagttgaggcatgaccccctccattcagacctctaactgttgcctgagtacacagatgtgccctgatttctggcccattggccatagtactgtgcctaatcaatgtaataggtttattttcccaatcctcaaactaaaaatgttcataacaagatgaattgtagactagtaacatttgatgcttttaaatatttgcttctttttaaacaaaaactaaaacccagaagtgaatttttaggtggatttttaaataaaaaagattgattg

SEQ ID NO: 46 - DNA, 383 bp, Homo sapiens
  misc_feature (1)..(383): where n may be a or g or c or t/u, unknown, or other
gaggtccctgctgctattgccccattccangggagggtgttgattggtgtggggaagctgttgcgtgtctatgacctgggaaagaagaagttactccgaaaatgtgagaataagcatattgccaattatatctctgggatccagactatcggacatagggtaattgtatctgatgtccaagaaagtttcatctgggttcgctacaagcgtaatgaaaaccagcttatcatctttgctgatgatacctacccccgatgggtcactacagccagcctcctggactatgacactgtggctggggcagacaagtttggcaacatatgtgtggtgaggctcccacctaacaccaatgatgaagtagatgaggatcctacaggaaacaa

SEQ ID NO: 47 - DNA, 574 bp, Homo sapiens
aggctggtgatcaggatgcccttctgtcatctgtctacctacagcctggtttgggtcatggcagcagtggtgctgtgcacagcacaagtgcaagtggtgacccaggatgaaagagagcagctgtacacacctgcttccttaaaatgctctctgcaaaatgcccaggaagccctcattgtgacatggcagaaaaagaaagctgtaagcccagaaaacatggtcaccttcagcgagaaccatggggtggtgatccagcctgcctataaggacaagataaacattacccagctgggactccaaaactcaaccatcaccttctggaatatcaccctggaggatgaagggtgttacatgtgtctcttcaatacctttggttttgggaagatctcaggaacggcctgcctcaccgtctatgtacagcccatagtatcccttcactacaaattctctgaagaccacctaaatatcacttgctctgccactgcccgcccagcccccatggtcttctggaaggtccctcggtcagggattgaaaatagtacagtgactctgtctcacccaaatgggaccacgt

SEQ ID NO: 48 - DNA, 2838 bp, Homo sapiens
gggcgcagagctgggccgagccgtcgccggcgccacgcgagtcccgcagccgccgcgcccgggcaatgggccgggggcactgagggccgccggggccgagcgcggaggggggaccgagccagtgccgtgccctcgggccgcgccaacatgccccgcggcttcctggtgaagcgcagcaagaagtccacgcccgtttcctaccgggtccgcggcggcgaggacggcgaccgcgcactgctgctctcgcccagctgcgggggcgcccgcgccgagcccccggcgccgagcccggtccccgggccgctgccgccgccgccgcccgcggagcgcgcccatgcagcgctcgccgccgcgcttgcctgcgcgcctgggccgcagccacccccgcagggcccgcgggccgcgcacttcggcaaccccgaggctgcgcaccccgcgccgctctacagtcccacgcggcccgtgagccgcgagcacgagaagcacaagtacttcgaacgcagcttcaacctgggctcgccggtctcggccgagtccttccccacgcccgccgcgctgctcggagggggcggcggcggcggcgcgagcggagctggcggaggcggcacctgcggcggcgacccgctgctcttcgcgcccgccgagctcaagatgggcacggcgttctcggctggcgccgaggcggcccgcggcccgggccccggccccccactgccccctgccgccgccctgcggcccccgggaaagcggcccccgccccctaccgccgcggagccgcccgccaaggcagtcaaggccccgggcgccaagaagcccaaggccatccgcaagctgcacttcgaggacgaggtgaccacgtcgcccgtgctggggctcaagatcaaggagggcccggtggaggcgccgcggggccgcgcggggggcgcggcgcggccgctgggcgagttcatctgccagctgtgcaaggaggagtacgccgacccgttcgcgctggcgcagcacaaatgctcgcgcatcgtgcgtgtggagtaccgctgtcccgagtgcgccaaggtcttcagctgcccggccaacctggcctcgcaccgccgctggcacaaaccgcggcccgcgcccgccgccgcccgcgcgccggagccagaagcagcagccagggctgaggcgcgggaggcacccggcggcggcagcgaccgggacacgccgagccccggcggcgtgtccgagtcgggctccgaggacgggctctacgagtgccatcactgcgccaagaagttccgccgccaggcctacctacgcaagcacctgctggcgcaccaccaggcgctgcaggccaagggcgcgccgctagcgcccccggccgaggacctactggccttgtaccccgggcccgacgagaaggcgccccaggaggcggccggcgacggcgagggggccggcgtgctgggcctgagtgcgtccgccgagtgccacctgtgcccagtgtgcggagagtcgttcgccagcaagggcgctcaggagcgccacctgcgcctgctgcacgccgcccaggtgttcccctgcaagtactgcccggccaccttctacagctcgcccggccttacgcggcacatcaacaagtgccacccatccgaaaacagacaggtgatcctcctgcaggtgcccgtgcgcccggcctgctagagcgcgccctccaccccggcccccgaactgtgccttcgcttggagacccacaaagagagtgcgccctgcacgccccgaacccgagtccgcgctgggggagcctcgcccccgcccccaccgggtgagagtgtcgtctccgcttctctcggtgtggcgtgacggtaaccccatactctccttttgactccttttggaacccccacttttacgttgtgtccctccgcctcccccatggcgcaacaggagtcagtctctttctgtacaagggagaaaagctgtacgcgtttgtctcgtggttggaagcctccccttggcggggagaagctttttttcttgctagtattcgctgtgttcatggtctagaaatgcggtctggtctcgcctcgcctaccaatctctgctctctatgtatgtagcgtacgggttgttttgggtgaatcttgaggaataaatgcctttatatttcacaggctgtaaattgaacttcccacacgattagctttattatggcttgtgaactgctggagtctggctttacctttttgtatgtgaacaaatcaaattgcttaaaaaagagttttctttagtatagccacaaatgccttgaactgttgtctgggattgttttgtggggggagggaagggagtgttccgaagatgctgtagtaactgcctcagtgtttcacgtaagactttttggtttgatcatctttgttgaggtaggactatcagttccctctaaatgtatatgttgatttatgagtaattgttatttattctttatttatttatattaattatgaagattatgatattatttgattgcagatttttttggcgcgctgccccctccccaccctgccactcttgacattccactgtgcgttttagaagagagcctttttctaaagggatctgcttaaagttttaacttttatacctatctgagtgaattacagacaacctatcatttattctgcttcgagggtccccagggcccttgtacaaccgacagctcttacttttaaatgcaatctcttttctacatacattattttcttaattgttagctatttatagaaagcttcaatagaactgtttcaactgtataactatttactattcaaataaaatattttcaaagtcaaaaaaaaaaaa

SEQ ID NO: 49 - DNA, 744 bp, Homo sapiens
  misc_feature (1)..(744): where n may be a or g or c or t/u, unknown, or other
cctcttcaagagcatctggaacaacagatggctgcgcaccatctctgtgatcctgttcctcaacaagcaagatctgctcgctgagaaagtccttgctgggaaatcgaagattgaggactactttccagaatttgctcgctacactactcctgaggatgctactcccgagcccggagaggacccacgcgtgacccgggccaagtacttcattcgagatgagtttctgaggatcagcactgccagtggagatgggcgtcactactgctaccctcatttcacctgcgctgtggacactgagaacatccgccgtgtgttcaacgactgccgtgacatcattcagcgcatgcaccttcgtcagtacgagctgctctaagaagggaacccccaaatttaattaaagccttaagcacaattaattaaaagtgaaacgtaattgtacaagcagttaatcacccaccatagggcatgattaacaaagcaacctttcccttcccccgagtgattttgcgaaacccccttttcccttcagcttgcttagatgttccaaatttaaaaagcttaaggcggnctacagaaaaaggaaaaaaggccacaaaagttccctctcactttcaataaaaataataaaaccgcagcagcaaacaaataaaatgaaataaaggaaacaaatgaaataaatattgtgttgtgcagcattaaaaaaaatcaaaataaaaataaatgtgagccangaaaaaaaaaaaa

SEQ ID NO: 50 - DNA, 2298 bp, Homo sapiens
tcggccgagcccagagacagccagttcctctcccgccgcgccgggccgcgtgccgctcgctccccggccgtggcgcctccgggccagacgcgctgcagcctccagcccgcggcaagcgggcggggcggccgcgccacccccggccccgcgccagcagcccctcgccgcgcgtccagcgttcccggccagcagcctccccatacgcagtcctgctggaccgccccgtcgcgccccccactctgaactcaagtcaccgtggagctccgccgccccgaaactttcacgcgagcgggaaatatgggatgtataaaatcaaaagggaaagacagcttgagtgacgatggagtagatttgaagactcaaccagtacgtaatactgaaagaactatttatgtgagagatccaacgtccaataaacagcaaaggccagttccagaatctcagcttttacctggacagaggtttcaaactaaagatccagaggaacaaggagacattgtggtagccttgtacccctatgatggcatccacccggacgacttgtctttcaagaaaggagagaagatgaaagtcctggaggagcatggagaatggtggaaagcaaagtcccttttaacaaaaaaagaaggcttcatccccagcaactatgtggccaaactcaacaccttagaaacagaagagtggtttttcaaggatataaccaggaaggacgcagaaaggcagcttttggcaccaggaaatagcgctggagctttccttattagagaaagtgaaacattaaaaggaagcttctctctgtctgtcagagactttgaccctgtgcatggtgatgttattaagcactacaaaattagaagtctggataatgggggctattacatctctccacgaatcacttttccctgtatcagcgacatgattaaacattaccaaaagcaggcagatggcttgtgcagaagattggagaaggcttgtattagtcccaagccacagaagccatgggataaagatgcctgggagatcccccgggagtccatcaagttggtgaaaaggcttggcgctgggcagtttggggaagtctggatgggttactataacaacagtaccaaggtggctgtgaaaaccctgaagccaggaactatgtctgtgcaagccttcctggaagaagccaacctcatgaagaccctgcagcatgacaagctcgtgaggctctacgctgtggtcaccagggaggagcccatttacatcatcaccgagtacatggccaagggcagtttgctggatttcctgaagagcgatgaaggtggcaaagtgctgcttccaaagctcattgacttttctgctcagattgcagagggaatggcatacatcgagcggaagaactacattcaccgggacctgcgagcagctaatgttctggtctccgagtcactaatgtgcaaaattgcagattttggccttgctagagtaattgaagataatgagtacacagcaagggaaggtgctaagttccctattaagtggacggctccagaagcaatcaactttggatgtttcactattaagtctgatgtgtggtcctttggaatcctcctatacgaaattgtcacctatgggaaaattccctacccagggagaactaatgccgacgtgatgaccgccctgtcccagggctacaggatgccccgtgtggagaactgcccagatgagctctatgacattatgaaaatgtgctggaaagaaaaggcagaagagagaccaacgtttgactacttacagagcgtcctggatgatttctacacagccacggaagggcaataccagcagcagccttagagcacagggagacccgtccatttggcaggggtggctgcctcatttagagaggaaaagtaaccatcactggttgcacttatgatttcatgtgcggggatcatctgccgtgcctggatcctgaaatagaggctaaattactcaggaagaacaccctctaaatgggaaagtattctgtactcttagatggattctccactcagttgcaacttggacttgtcctcagcagctggtaatcttgctctgcttgacaacatctgagtgcagccgtttgagaagaaaacatctattctctccaaaaatgcacccaactagctctatgtttacaaatggacataggactcaaagtttcagagaccattgcaatgaatccccaataattgcagaactaaactcatttataaagctaaaataaccggatatatacatagcatgacatttctttgtgctttggcttacttgttt

SEQ ID NO: 51 - DNA, 6331 bp, Homo sapiens
atctttgtttgggtctcccatactgcgtatagatgaatgggtcaggatatctggaacaaaatatggaggtgaagggtgagatcgggaaacaaagggtatggccccctagttcccaaagggagcagggagatgggaatagaattgaaggtaggttttaggctacttgggaggaggaatatttaggtaattgtggagactttctcctgtgtgatgaaggcggcagacactgtgatcctgtgggcaagaagtaaaaatgaccagctgaggatttcttttcctccaggactgtgttggggtgacaggatgcctgataaggatgacattcggctgctgccgtcagcattgggtgtgaagaagagaaaacgaggacccaagaagcagaaggagaacaagccaggaaaaccccgaaaacgcaagaagcgtgacagtgaggaggaatttggttctgagcgagatgagtaccgggagaagtcagagagtgggggcagtgaatatggaaccggaccgggtcggaaacgaagaaggaagcaccgagaaaaaaaggagaagaagacaaagcggcggaaaaagggggagggagatggggggcaaaagcaagtggaacagaagtcatcagcaactctgcttctgacctggggcctggaggatgtggagcatgtgttctctgaggaggattaccacacgctcaccaactacaaagccttcagccagttcatgaggcccctaattgctaagaagaatcctaagatcccaatgtctaagatgatgaccatccttggggccaaatggagagagttcagtgccaacaaccccttcaaggggtcagcagctgctgtggcggcggcagcggcagcagcagcagcagctgtagctgagcaggtgtcagctgctgtctcgtcggccacccccatagcaccctccggaccccccgcccttccaccaccccctgctgctgatatccagcccccacccatccgaagagccaaaaccaaagagggcaaaggtccaggccataagaggcggagtaagagcccccgagtgcctgatggacgcaagaagcttcggggaaagaaaatggcaccactcaaaataaaactagggcttctgggtggcaagaggaagaaaggaggctcgtatgtttttcagagcgacgaaggtcctgaaccagaggctgaggaatcagacctggacagtggcagtgtccacagtgcctcaggccggcctgatggccctgtccgcaccaagaaactaaagagaggccggccaggaaggaagaagaagaaggtcctgggctgtcctgcagtggccggggaggaggaggttgatggctacgagacggatcaccaggattactgtgaggtgtgccagcagggtggggaaattattctgtgtgacacctgccctcgtgcctaccacctcgtctgccttgatcctgagcttgaccgggctccagagggcaaatggagctgccctcactgtgagaaggagggggtccagtgggaggccaaggaggaagaagaagaatacgaagaggagggagaggaagaaggggagaaggaggaggaggatgatcacatggagtactgccgcgtatgcaaggacggcggggagctcctgtgctgtgacgcgtgcatctcctcctaccacattcattgtctaaaccctcccctgcctgacattcccaatggtgaatggctgtgtccccgatgcacatgccccgtgctgaagggtcgagtgcagaagatcctacattggcggtggggggagccacctgtagcagtgccagcccctcaacaggcagatggaaatccagatgtcccacccccccgtcctcttcaaggcagatcagagcgagagttctttgtcaagtgggtaggactatcctactggcactgctcctgggccaaggagcttcagctggaaatcttccatttggttatgtatcgaaactaccagcggaagaatgacatggatgagcccccacccctggactatggctccggcgaggatgatgggaagagcgacaagcgtaaagtgaaagacccgcactatgctgagatggaggagaagtactatcgttttggcatcaagccagagtggatgaccgtccaccgcatcatcaaccacagtgtggataaaaaggggaattaccactatctagtaaaatggagggacttaccatatgaccagtccacgtgggaggaagatgaaatgaatatccctgaatacgaagaacataagcaaagctactggagacaccgagaactaattatgggggaagaccctgcccagccccgcaagtataagaagaagaagaaggagctacagggtgatgggcctcccagttctcccactaatgatcctaccgtgaaatatgagactcagccacggtttatcacagccactggaggcaccctgcacatgtatcagttggaagggctgaactggctacgcttctcctgggcccagggcactgacaccattctagctgatgagatggggctaggcaagaccatacaaaccatcgtcttcctctactcactctacaaggagggccacacaaaaggtcccttcctggtgagtgccccactctctaccatcattaactgggagcgggagttccagatgtgggcacccaaattctatgtggtgacatacacgggtgacaaggacagccgggccatcattcgtgagaatgaattctcctttgaggacaatgccatcaaagggggcaagaaagcttttaagatgaaaagggaggcacaggtgaagttccatgttctcctgacatcgtatgagctgatcaccattgatcaggcagcacttggttccatccgctgggcctgtcttgtggtagatgaggcccatcgactcaagaacaaccagtccaagtttttcagggttctcaatggttacaagatagatcataagttgctgctgacaggaaccccattgcagaataatctggaggagctcttccatctcctgaacttcctcaccccagagagatttaacaacttggagggcttcctggaggagtttgctgacatatccaaagaggaccagatcaagaaactgcatgatttgctggggccacacatgctgcggagactcaaggcagatgtctttaagaacatgccagccaagacagagctcatcgttcgggtggagctaagccccatgcagaagaaatactacaaatacatcctgactcgaaattttgaggccttgaattcacgaggtggtgggaaccaggtgtcgctgcttaatatcatgatggatcttaagaagtgctgcaaccatccatacctttttcccgtggctgctatggagtcccccaaactccccagtggggcttatgagggtggggcacttattaagtcgtctgggaagctcatgctgctccagaagatgctgcgaaagctgaaggagcaaggacaccgagtgctcatcttctcgcagatgaccaaaatgttagacttgcttgaggacttcttagactatgaaggctacaagtatgagcgcatcgatggtggtatcacgggtgccctgaggcaggaggccatcgatcggtttaatgctcctggggcccaacaattctgcttcctcctgtccacccgagctgggggcctgggcatcaatctggccactgctgacactgtcatcatctttgattctgactggaacccccataatgacatccaggcctttagccgggctcatcggattggccaggccaacaaagtgatgatttaccggtttgtgactcgcgcgtcagtggaagagcgaatcacacaagtggccaagagaaagatgatgctgacacacctggttgtgcggcctgggctgggctccaaggcaggctccatgtccaagcaggagcttgacgacattctcaaatttggcactgaagagctattcaaggatgaaaacgagggggagaacaaggaggaggacagcagtgtgattcattatgacaatgaggccatcgctcggctgttggaccggaaccaggatgcaactgaggacactgacgtgcagaacatgaatgagtatctcagctccttcaaggtggcacagtacgtcgtgcgggaagaagacaagattgaggaaattgagcgagagatcatcaagcaggaggagaatgtggaccctgactactgggagaagctgctgaggcatcactatgagcaacagcaggaagacctagcccggaatctaggcaagggcaagcgggttcgcaagcaagttaactacaatgatgctgctcaggaagaccaagacaaccagtcagagtactcggtgggttcagaggaggaggatgaagacttcgatgaacgtcctgaagggcgtagacagtcaaagaggcagctccggaatgagaaagataagccactgcctccactgctggcccgagtcgggggcaacattgaggtgctgggcttcaacacccgtcagcggaaggctttcctcaatgctgtgatgcgctgggggatgccaccacaggatgccttcaccacacagtggctggtgcgggacctgaggggcaagactgagaaggagtttaaggcctatgtgtctttgttcatgcgccatctgtgtgagcctggggcagacggctctgaaacctttgccgatggggtccctcgggagggactgagtcgccagcaggtgttgacccgcattggagtcatgtctctcgtcaaaaagaaggtgcaggagtttgagcacatcaatgggcgttggtcaatgccggaactgatgcctgaccccagcgccgattctaagcgctcctccagagcctcctctcctaccaaaacgtctcccaccactcctgaggcttctgctaccaacagtccctgcacctctaaacctgctactccagctccaagtgagaaaggagaaggcataaggacacctcttgagaaggaggaagctgaaaaccaggaggaaaagccagagaagaacagcagaattggggagaagatggagacagaggctgatgcccccagcccagccccatcacttggggagcggctggagccaaggaagattcctctagaggatgaggtgccaggggtgcctggagagatggagcctgaacctgggtaccgtggggacagagagaagtcagaagatgtaaaaggtgaccgggagcttcgaccagggcctcgagatgagccacggtccaatgggcgacgagaggaaaagacagagaagccccggttcatgttcaatatcgccgatggtggcttcacagagcttcacacactgtggcagaatgaggaacgggcagctatttcctcggggaaactcaatgagatctggcacagaagacatgactattggcttctggctgggattgtcctccatggctatgcacggtggcaggacatccagaatgatgctcaatttgccattatcaacgagccatttaaaactgaagccaataaggggaactttctggagatgaaaaataagttcctggcccggaggttcaagctcctggagcaggcgctggtgattgaggagcagctgcggcgggcggcctacctgaacctgtcgcaggagccggcgcaccccgccatggccctccacgcccgcttcgccgaggccgagtgcctggccgagagccaccagcacctctccaaggagtcgctggcggggaacaagccggccaacgccgtcctgcacaaggttctgaaccagctggaggagttgctgagcgacatgaaggcggacgtgacccgcctgccagccacgctgtcccgaataccccccatcgcagcccgccttcagatgtccgagcgcagcatcctcagccggctggccagcaagggcacggagcctcaccccacaccggcctacccgccgggtccctacgctacacctccggggtacggggcggccttcagcgccgcacccgtaggggccctggccgccgcaggcgccaattacagccagatgcctgcagggtccttcatcacagccgccaccaacggcccaattcaccgattttttaaaaaagttccagaaatccagtgacgaatgtggtatacaaaaaaatatataaattctttcaacttagaataattaagtcataaaatacatagggtacaaataccacattccgttctaaaatgatatcttaggatcatcaaaagaaaaagaggatttggattatgcaaaaaatgattcctatatatataatcaattatctaactgacatttttgcaaatctaccacaacttcgccttttattgcatatgctaaacaagcagatgctaagtctgtaaactgtgaattaacctcctttttaattaattgttcg

SEQ ID NO: 52 - DNA, 1908 bp, Homo sapiens
cctgtcctcccgcgggtccgagggcgctggaaacccagcggcggcgaagcggagaggagccccgcgcgtctccgcccgcacggctccaggtctggggtctgcgctggagccgcgcggggagaggccgtctctgcgaccgccgcgcccgctcccgaccgtccgggtccgcggccagcccggccaccagccatgggctctggcccgctctcgctgcccctggcgctgtcgccgccgcggctgctgctgctgctgctgtctctgctgccagtggccagggcctcagaggctgagcaccgtctatttgagcggctgtttgaagattacaatgagatcatccggcctgtagccaacgtgtctgacccagtcatcatccatttcgaggtgtccatgtctcagctggtgaaggtggatgaagtaaaccagatcatggagaccaacctgtggctcaagcaaatctggaatgactacaagctgaagtggaacccctctgactatggtggggcagagttcatgcgtgtccctgcacagaagatctggaagccagacattgtgctgtataacaatgctgttggggatttccaggtggacgacaagaccaaagccttactcaagtacactggggaggtgacttggatacctccggccatctttaagagctcctgtaaaatcgacgtgacctacttcccgtttgattaccaaaactgtaccatgaagttcggttcctggtcctacgataaggcgaaaatcgatctggtcctgatcggctcttccatgaacctcaaggactattgggagagcggcgagtgggccatcatcaaagccccaggctacaaacacgacatcaagtacaactgctgcgaggagatctaccccgacatcacatactcgctgtacatccggcgcctgcccttgttctacaccatcaacctcatcatcccctgcctgctcatctccttcctcactgtgctcgtcttctacctgccctccgactgcggtgagaaggtgaccctgtgcatttctgtcctcctctccctgacggtgtttctcctggtgatcactgagaccatcccttccacctcgctggtcatccccctgattggagagtacctcctgttcaccatgatttttgtaaccttgtccatcgtcatcaccgtcttcgtgctcaacgtgcactacagaaccccgacgacacacacaatgccctcatgggtgaagactgtattcttgaacctgctccccagggtcatgttcatgaccaggccaacaagcaacgagggcaacgctcagaagccgaggcccctctacggtgccgagctctcaaatctgaattgcttcagccgcgcagagtccaaaggctgcaaggagggctacccctgccaggacgggatgtgtggttactgccaccaccgcaggataaaaatctccaatttcagtgctaacctcacgagaagctctagttctgaatctgttgatgctgtgctgtccctctctgctttgtcaccagaaatcaaagaagccatccaaagtgtcaagtatattgctgaaaatatgaaagcacaaaatgaagccaaagagattcaagatgattggaagtatgttgccatggtgattgatcgtatttttctgtgggttttcaccctggtgtgcattctagggacagcaggattgtttctgcaacccctgatggccagggaagatgcataagcactaagctgtgtgcctgcctgggagacttccttgtgtcagggcaggaggaggctgcttcctagtaagaacgtactttctgttatcaagctaccagctttgtttttggcatttcgaggtttacttattttccacttatcttggaatcatgcaaaaaaaaaatgtcaagagtatttattaccgataaatgaacatttaactagc

SEQ ID NO: 53 - DNA, 1955 bp, Homo sapiens
cccgccctcagtcgctgggccagcctgcccggccccagcatgcgggaggcagccttcatgtacagcacagcagtggccatcttcctggtcatcctggtggccgcactgcagggctcggctccccgtgagagccccctcccctatcacatccccctggacccggaggggtccctggagctctcatggaatgtcagctacacccaggaggccatccatttccagctcctggtgcggaggctcaaggctggcgtcctgtttgggatgtccgaccgtggcgagcttgagaacgcagatctcgtggtgctctggaccgatggggacactgcctattttgcggacgcctggagtgaccagaaggggcagatccacctggatccccagcaggactaccagctgctgcaggtgcagaggaccccagaaggcctgaccctgcttttcaagaggccctttggcacctgcgaccccaaggattacctcattgaggacggcactgtccacttggtctacgggatcctggaggagccgttccggtcactggaggccatcaacggctcgggcctgcagatggggctgcagagggtgcagctcctgaagcccaatatccccgaaccggagttgccctcagacacgtgcaccatggaggtccaagctcccaatatccagatccccagccaggagaccacgtactggtgctacattaaggagcttccaaagggcttctctcggcaccacattatcaagtacgagcccatcgtcaccaagggcaatgaggcccttgtccaccacatggaagtcttccagtgcgcccccgagatggacagcgtcccccacttcagcgggccctgcgactccaagatgaaacccgaccgcctcaactactgccgccacgtgctggccgcctgggccctgggtgccaaggcattttactacccagaggaagccggccttgccttcgggggtccagggtcctccagatatctccgcctggaagttcactaccacaacccactggtgatagaaggacgaaacgactcctcaggcatccgcttgtactacacagccaagctgcggcgcttcaacgcggggatcatggagctgggactggtgtacacgccagtgatggccattccaccacgggagaccgccttcatcctcactggctactgcacggacaagtgcacccagctggcactgcctccctccgggatccacatcttcgcctctcagctccacacacacctgactgggagaaaggtggtcacagtgctggtccgggacggccgggagtgggagatcgtgaaccaggacaatcactacagccctcacttccaggagatccgcatgttgaagaaggtcgtgtcggtccatccgggagatgtgctcatcacctcctgcacgtacaacacagaagaccgggagctggccacagtggggggcttcgggatcctggaggagatgtgtgtcaactacgtgcactactacccccagacgcagctggagctctgcaagacggctgtggacgccggcttcctgcagaagtacttccacctcatcaacaggttcaacaacgaggatgtctgcacctgccctcaggcgtccgtgtctcagcagttcacctctgttccctggaactccttcaactgcgacgtactgaaggccctgtacagcttcgcgcccatctccatgcactgcaacaagtcctcagccgtccgcttccagggtgaatggaacctgcagcccctgcccaaggtcatctccacactggaagagcccaccccacagtgccccaccagccagggccgaagccctgctggccccaccgttgtcagcattggtgggggcaaaggctgaggggggacctactcctccccctcctccatgctgtccctgtgggctcacaccggcactgtgcactctactctgcgacgatccccaaggaacagccctgcacgccc

SEQ ID NO: 54 - DNA, 1929 bp, Homo sapiens
ccccaaagttggagaatcccataaggagagtagccctgtaaggaattcgaatttccagcatttttcacctctgacagagcccagacaccatgaacgcaagtgaattccgaaggagagggaaggagatggtggattacgtggccaactacatggaaggcattgagggacgccaggtctaccctgacgtggagcccgggtacctgcggccgctgatccctgccgctgcccctcaggagccagacacgtttgaggacatcatcaacgacgttgagaagataatcatgcctggggtgacgcactggcacagcccctacttcttcgcctacttccccactgccagctcgtacccggccatgcttgcggacatgctgtgcggggccattggctgcatcggcttctcctgggcggcaagcccagcatgcacagagctggagactgtgatgatggactggctcgggaagatgctggaactaccaaaggcatttttgaatgagaaagctggagaagggggaggagtgatccagggaagtgccagtgaagccaccctggtggccctgctggccgctcggaccaaagtgatccatcggctgcaggcagcgtccccagagctcacacaggccgctatcatggagaagctggtggcttactcatccgatcaggcacactcctcagtggaaagagctgggttaattggtggagtgaaattaaaagccatcccctcagatggcaacttcgccatgcgtgcgtctgccctgcaggaagccctggagagagacaaagcggctggcctgattcctttctttatggttgccaccctggggaccacaacatgctgctcctttgacaatctcttagaagtcggtcctatctgcaacaaggaagacatatggctgcacgttgatgcagcctacgcaggcagtgcattcatctgccctgagttccggcaccttctgaatggagtggagtttgcagattcattcaactttaatccccacaaatggctattggtgaattttgactgttctgccatgtgggtgaaaaagagaacagacttaacgggagcctttagactggaccccacttacctgaagcacagccatcaggattcagggcttatcactgactaccggcattggcagataccactgggcagaagatttcgctctttgaaaatgtggtttgtatttaggatgtatggagtcaaaggactgcaggcttatatccgcaagcatgtccagctgtcccatgagtttgagtcactggtgcgccaggatccccgctttgaaatctgtgtggaagtcattctggggcttgtctgctttcggctaaagggttccaacaaagtgaatgaagctcttctgcaaagaataaacagtgccaaaaaaatccacttggttccatgtcacctcagggacaagtttgtcctgcgctttgccatctgttctcgcacggtggaatctgcccatgtgcagcgggcctgggaacacatcaaagagctggcggccgacgtgctgcgagcagagagggagtaggagtgaagccagctgcaggaatcaaaaattgaagagagatatatctgaaaactggaataagaagcaaataaatatcatcctgccttcatggaactcagctgtctgtggcttcccatgtctttctccaaagttatccagagggttgtgattttgtctgcttagtatctcatcaacaaagaaatattatttgctaattaaaaagttaatcttcatggccatagcttttattcattagctgtgatttttgttgattaaaacattatagattttcatgttcttgcagtcatcagaagtggtaggaaagcctcactgatatattttccagggcaatcaatgaacacgcaacttgaaattatatctgtggtcttcaaattgtcttttgtcatgtggctaaatg

SEQ ID NO: 55 - DNA, 2454 bp, Homo sapiens
ccaggaggcacgctggttttccggggccgctccatcgcgccttcctcctgcgcctcgcttctccggtccagccgccatcttcctttccgcacaggggccgccgagcggggccatgcagccaacgctgcttctcagcctcctgggagccgtggggctggcggctgtcaattccatgccagtggataacaggaaccacaatgaaggaatggtgactcgctgcatcattgaggtcctctcaaatgccttgtcgaagtccagcgctccacccatcacccctgagtgccgccaagtcctgaagacgagtagaaaagacgtcaaagacaaagagacaactgaaaatgaaaacacaaagtttgaagtaagattgttaagagacccagctgatgcctcggaagcccacgagtcctccagcaggggagaggcaggagccccaggggaggaggacatccaaggcccaacaaaggcagacacagagaaatgggcagagggaggcgggcacagccgagagcgagcggatgagccccagtggagcctctatccctccgacagccaagtctctgaagaagtgaagacacgccattctgagaagagccagagagaggatgaggaggaggaggagggagagaactatcaaaaaggggagcgaggggaagatagcagtgaagagaaacaccttgaagagccaggagagacacaaaacgcttttctcaatgaaagaaagcaggcttcagctataaaaaaagaggagttagtggccagatcggaaacacatgctgccgggcattctcaggagaagacacatagccgagagaagagtagccaggagagtggagaggaggcagggagccaggagaatcacccccaggagtctaaaggccaaccccgaagccaggaagaatctgaggaaggtgaggaagatgccacctctgaggtggacaaacgacgcacgaggcccagacaccaccacgggaggagcaggcccgacaggtcctctcaaggagggagtcttccctctgaggaaaagggacacccccaggaggaatctgaggagtcaaacgtcagcatggccagtttaggggaaaagagggaccaccattcaacccactacagggcttcagaggaagaacctgaatatggagaagaaataaagggttatccaggcgtccaggcccctgaggacctggagtgggagcgctataggggcagaggaagtgaagaatacagggctccaagacctcagagtgaggagagttgggatgaggaggacaagagaaactaccccagcttagagcttgataagatggcacatggatatggtgaagaaagtgaggaagagaggggccttgagccgggaaagggacgccatcacagaggcaggggaggggagccacgtgcctatttcatgtctgacaccagagaagagaaaaggttcttgggtgaaggacaccaccgtgtccaagaaaaccagatggacaaggcaaggaggcatccacaaggtgcgtggaaagagctggacagaaattatctcaactacggtgaggaaggagccccagggaagtggcagcagcagggagacctgcaggacactaaagaaaacagggaggaagctaggtttcaagataaacaatatagctcccatcacacagctgaaaagaggaagagattaggggaactgttcaacccatactacgaccctctccagtggaagagcagccattttgaaagaagagacaacatgaatgacaattttctcgagggtgaggaggaaaatgagctgaccttgaacgagaagaatttcttcccagaatacaactatgactggtgggagaaaaagcccttctctgaggatgtgaactgggggtatgagaagagaaacctcgccagggtccccaagctggacctgaaaaggcaatatgacagggtggcccaactggaccagctccttcactacaggaagaagtcagctgagtttccagacttctatgattctgaggagccggtgagcacccaccaggaggcagaaaatgaaaaggacagggctgaccagacagtcctgacagaggacgagaaaaaagaactcgaaaacttggctgcaatggatttggaactacagaagatagctgagaaattcagccaaaggggctgactgtcattggagcggtgggcactgttaagaagcagccatcacatgatctgtttttcaccacttcactgaaagacaccatttatatacccaagggcagaaagtagaacttactattcattaaatgtttgacacaattggaattgtctttaatttctgtcagaatgctattgaaaatgtgaattgcatgacttgtagcatattcttttctgcaaaatagacatattaacatgcttatgacaatgactgtgctactgtctttggaaaaatgtttgtctcagttggaaataataaaagattcacctgagacc

SEQ ID NO: 56 - DNA, 1986 bp, Rattus norvegicus
  misc_feature (1)..(1986): where n may be a or g or c or t/u, unknown, or other
ggcgcacagcttcctggttgctcctctgcagagacccctgggcacaccccacgagcgaacctgagcctcgggaccacaggtaagaccaaattttctgctgcaagaaagctgcctggtgagcttgggacacacggtagcagaatttctctaggaccaggcacgttctgtgtttaccggaagtcccacacccgcggatcccggcccgcagcagctctctgctcccagacccggtgagagagagacccaaccgcctggtcaggtgggcactcctgaggctgcagagcggaagagaccaccaacactgctcacccctgcccacatccctggcccaagaggaaactgtataaggcctctgggctcccgtgggggagggcccaggagcagcaggacacctgccagagacaccgccggaccctgaaggaaacagaccggataaacagttctctgcacccaaatcccgtgagagggagagctaaaccttcagagaggcagacaagcctgggaaaccagaagagactgctccctgcacacacatctcggacgccagaggaaaaagccaaagaccatctggaaccctggtgcactgaagctcccggaaggggcggcacaggtcttcctggttgctgccgctacagagagcccctgggcagcatcccacgagcgaacctgagcctcgggaccacaggtaagaccaaattttctgctgcaagaaagctgcctggtgaactcaagacacaggcccacaggaacagctgaagacctgtagagaggaaaaactaaacgcccgaaagcagaacactctgtccccataactgactgaaagagaggaaaacaggtctacagcactcctgacacacaggcttataggacagtctagccactgtcagaaatagcagaacaaagtaacactagagataatctgatggcgagaggcaagcgcaggaacccaagcaacagaaaccaagactacatgccatcatcggagcccaattctcccaccaaaacaaacatggaatatccaaacacaccagaaaagcaagatctagtttcaaaatcatatttgatcatgatgctggaggacttcaagaaagacatgaacacacttagggaagcacaggaaaacattaataaacaagtaaaagcctacagagaggaatcgcaaaaatccctgaaagaattccaggaaaacacaatcaaacagttgaaggaattaaaaatggaaatagaagcaatcaagaaagaacacatggaaacaaccctggatatagaaaaccaaaagaagagacaaggagctgtagatacaagcttcaccaacagaatacaagagatggragagagaatctcaggmgcagaagattccatagaaatcattgactcaactgtcaaagataatgtaaagcggaanaagctactggtccaaracatacaggaaatcnaggactcaatgagaagatcaaacctaaggataataggtatagaagagagtgaagactaccagctcaaaggaccagtaaatatcttcaacaaaatcatagaagaaaacttccctaacctaaaaaragagatacccatagacatacaagaagcctacagaactccaaacagattggaccagaaaagaaacacctcccgtcacataattgtcaaaacaccaaatgcacaaaataaagaaagaatattaaaagcagtaagggaaaaaggtcaagtaacatataaagggagacctatcagaatcacaccagacttctcgccagaaactatgaaggccagaagatcctggactgatgttatacagaccctaagagaacacaaatgccagcccaggttactgtatccagcaaaactctcaattaacattgatggagaaaccaagatattccatgacaaaaccaaatttacacaatatctttctacaaatccagcactacagaggataacaaatggtaaagcccaacataaggaggcaagctataccctagaagaagc

SEQ ID NO: 57 - DNA, 225883 bp, Mus musculus
gaattctcatattggttccctgaactgtagagtgagggctattatggttggaaaggccaaatggaagcctttagagttgcctctgccaaagaaaatagtgaatcaaaaacagtatcgtattcctggaggaattgcagaaattactgccactatcaaggacttgaaagatgcaggggtggtggttcccaccacatctccatttaactctcctatctggccagtgcagaaaacagatggatcatggagaatgacagttgattaccgaaaactaaatcaggtagtaactccaattgcagctgctgtaccagatgtagtttccttacttgagcaaattaacacatctcctggcacctggtatgcggctattgatctggcaaatgccttcttctcagtgcctgtccataaggaccaccagaagcaatttgctttcagttggcaaggccaacagtataccttcacagttttgcctcaaggatatattaactctcctgccctgtgtcataatttagttagaagggatcttgatcgtttggatcttccacaaaatatcacattggtgcactatattgatgacattatgctgattggaccaagtgagcaggaagtagcaaccactttggactcattggtaacacatatgcgtatcagaggatgggaaataaatccaaccaaaattcaaggaccatctacctcagtgaaattcttaggagtccagtggtgtggggcatgcagagatattccttctaaggtgaaagataagttattgcacctggcccctcctacaaccaagaaagaagcacaacgtttagtgggtctatttggattctggagacaacacatccctcacttgggtgtgttacttaggcctatttaccaagtgactcggaaagctgctagctttgtgtggggcctggaacaggagaaggcccttcaacaggtccaggctgctgtgcaggctgctctaccacttggaccatatgacccagcagatccgatggtacttgaggtgtctgtggctgatagagatgctgtttggagcctctggcaggcccctgtaggtgaatcacagaaaaggcctttgggattttggagcaaagctctaccatcatctgcagacaactattctccctttgaaaaacagctcttggcctgctattgggccttagtggaaactgaacgtctgacaataggacaccaagtcactatgcgacctgaactacccatcatgagctgggtactatcagaccctgcaagtcataaagtgggacgtgcacagcagcagtctattatcaaatggaagtggtatatacgtgatcgggccagagcaggtcctgaaggcacaagcaagttacatgaagaagttgctcaaatgcctatggtttctactcctgttacaatgccatctgctgccaagcatgcacctatagcctcatggggtgttccctatgatcaactgaccgaagaggagaagactagagcctggtttactgatggctctgcacgttatgcaggcaccacccagaagtggacagctgcagcattacaacccctttctgggacaaccttgaaagacacaggtgaagggaaatcttcacagtgggcagaacttcgggcagtacacatggtattacagtttgtttgcaagaagaaatggccagatgtacgattatacactgactcatgggctgtagccaatggattggctggatggtcagggacttggaaagatcacaattggaaaattggtgagaaagacatctggggaagaagtatgtggatagatctctccaaatgggcaaaggatgtgaagatatttgtgtcccatgtaaatgctcaccaaaaggtgacttcagctgaggaggagttcaataatcaagtggataagatgacccgttctgtggacaatcagcctctctccccagccatccctgtcattgctcaatgggcacatgaacaaagtggccatggtggtcgagatggaggttatgcttgggctcagcaacatgggcttccactcaccaaggctgacctggctacagctgctgctgattgccagatctgccaacagcagaaaccaacactgagccccagatatggcaccattcctcgaggtgaccagccagcaacctggtggcaggttgactacattggaccacttccttcgtggaaaggacagcgttttgttcttactggagtagatacttattctggttatggatttgcctttcctgcacgtaatgcctctgctaaaaccaccattcacggactgacagaatgcctcatctatcgtcatggtattccacacagtattgcttctgaccaaggaactcatttcacagccagagaagtacgacagtgggctcacgatcatggaattcactggtcttaccacattccccatcatcctgaagcagctgggctgatagaaagatggaatggccttttgaagacgcagttacagcgccaattaggtggtaacagcttggaaggctggggcagagttcttcagaaggcagtatatgctttgaatcagcgctcgatatatggtacagtttcacccatagccaggattcatgggtccaggaatcaaggggtggaaaacggaatagttccacttactatcactcctagtgaccctctaggaaaatttttgcttcctgtccccataactctaggttctgctggcttagaagttttggctccagagaggggagtgctcctaccaggagctacaacaaacatttcattgaactggaagctcagacttccccctggtcattttgggcttctaatgcccttaaaccaacaggctaaaaaaggaataacagtgttaggaggggtgatagatccagattaccatggggaaattggattacctcttcacaatggtggtaagcaagattatgtctggagtgcaggagatcccttagggcgtctcttagtactaccatgtcctgtgattaaagtcaatgggaaactacaacagcctaatccaagcaggatgacaaaggacgcagacccatcaggaatgaaggtatgggtcaatcctccaggaaaagagccaagacctgctgaggtgctggctgaaggtgaaggaaatacagaatgggtagtagaggaaggtagttataaataccaattaaggccacgtaaccagttgcagaaacgaggattataaagtaatatgaatgcccattgtaaatttactaatgcgtttgtgattgtacgagggatagttatatcatgttaggcgtatttacaaccttgttattgtttcatgtgaacatgagatattatttgtgtcaagttgacaaggggtggattgtagtggctattcctggttgtcaacttgacaatatttggaatgaactacaatccggaattggaaggctcaccagtgacccttatctggaggcttggagatccttatctggatcttggtttgaagatcttgagccatagtggctatggattccagaagattgaatctccgagttaaggaacacacctttaatctgggctatgcctttcatctgggattaaaggtgtggtggaacacacctttaatctgggctacaccttttgctggagacaatataaggacattggaagaagggagtctagctcttgctcttgctccttcgcctgcttgtcgtgtgagactgagtaactgctagatccttggacttccattcacagctgcgactgaacaattgtaaggaattgggctgccgactgtaagtcattaataaattcctttactatctagagactatccataagttctgtgactctagagaaccctgactaatacagaaaccatgtcctagaaaaagcaagaaggtaatccctcaacaaacctaaaagaagacagtaacaagaacagaatgcgaactttaacaacaaaaataattggaagcaacaattacttttccttaatatcaatggactcaactcaccaataaaaaggcatagactaacagactggctacacaaacagggcccaacattttgctgcttacaggaaacccatctcagggaaaaagatagacactacctcagaatgaaaggctggaaaacaattttccaagcaaatggtctgaataaacaagctggagtagccattctaatatctaataaaatctacttccaatccgaagtcatcaaaaaagacaaggagggtcacttcatactcatcaaaggtaaaatcttccaagaggaactctcaattctgaatatctatgctccaaatacaagggcagccacattcattaaagaaactccagtaaagctcaaagcacacattgcaccttacacaataatagtgggagacttcaatacaccactttcaccaatggacagatcatggaaacagaaactaaacagggacacagtgaaactaacagaagttatggaacaaatggatctaacagatatctacagaacattttatcctacaacaaaaggatataccttcttctcagcacctcatgataccgtctccaaatttgtccacataattgatcaggaaacaagcttcaacagatacaaaaatattgaaattgtcccatgcatcctatcagatcacaatggattaaagctgatcttcaataacaaaataaataatagaaagccaacattcacgtggaaactgaacaacactcttttcaatgataccttggtcagggaaggaataaagaaagaaattaaggactttttagagtttaatggaaatgaagccacaacctacccaaacttatgggacacaatgaaagcatttctaagaggaaaactcatacctctgagtgcctccaaaaataaactagagagagcacacattagcagcctgacaacacacctaaaagctccagaacaaaaggaagcaaattcacccaagaggagtagacagtaggaaataatcaaactcaggggcaaaatcaaccaagtggaaacaagaactattcaaagaatcaaccaaatgaagagctggttctttgagaaaatcaacaagatagataaacccttagctagactcactagagggcacagggaaatcatcctaattaacaaaatcagaaatgaaaagggagacataacaacagatcctgaagaaatccaaaacaccatcagatccttctacaaaaggctatactcaacaaaactgaagaacctggatgaaatggacaagtttctagacagataccaggtaccaaagttaaatcaagatcaggttaatgatctaaacagtcctatatccccttaagaaatagaagaagtcattgatagtctcccaaccaaaaaaagcccaggaccagatgggtttagtgcagagttctatcagaccttcaaagaagatctaatcccagttcttcacaaactattccacaaaatagaagcagaaggtactctacccaactcattctatgaagccacgattactctgatagctaaaccacaaaaagacccaacaaagatagagaacttcagaccaatttcccttatgaatatcgatgcaaaaatcctcaataaagttctccctaaccgaatccaagaacacatcaaaacaataatccatcctgaccaagtaggtttcatcccagggatgcaaggatggttcaatataaagaaatccatcaacataatccattatataaacaaactcaaagacaaaaaccacatgatcatttcgttagatgtggagaaagcatttgacaaaatccaacacccattcatgttaaaagtcttggaaagatcaggaattcaaggcccatacataaacatgataaaaaacaatctacagcaaaccagtagccaaaatcaaagtaaatgatgagaagctggaagcaaccccactaaaatcagggactggacaaggctgcccactttccccatacctattcaacattgtacttgaagtcctaggcagagcaatttgacaacaaaaggagatcaaggggatataaattggaaaggaagaagtcaaaatatcacttttagcagatgatatgatagtatatataagtgaccctaaacattctaccagagaactcctaaaccatataaacagcttcagtgaagtagctgcatataaaattaactcaaacaagtcaatggcctgtctgtacacaacggataaacaggctgagaaagaaattagggaaagaacacccttttcaatagtcacaaatgatataaaataccttggcgtgactctaaggaagagaaagatctttatgataagaacttcaagtctctgaagatagaaataaaagaaaatgtcagaacctggaaatatctcccatgctcatgtattggcaggatcaatatagtaaaaatggctatctttccaaaagcaatctacagattcaatgcaatccccatcaaaatttcaactcaattcttaaatgaattagaaagggcaatctgcacattcatctggagtaacaaaaaacctaggatagcaaaaactctgcttaaggataaaaaatcctcaggtggaatcaccatgcctgacctaaagctgtactacagagcaattgtgataaaaacaaaacaaaaaacaaaaaacaaaaaaacaaaaaacaaaaaacaaaaaaaacaaaaaacaaaaaacaaacaaacaaacaaacaaaaaaactgcatggtactggtatagcaacagacaagtagaccaatagaatagaattgaagacccagaaataaacacacacacttatggtcacttgatcttggacaagggagctaaaaccatccagtgggaaaaagacagcattttcaacaaatggtgttggcacaactggccgttatcatgtagaagaatacgaattgatccattcctaacccctgtactaaggtcaaatctaaggggattaaggaactccacataaaaccagagacactgaaacttatagaggagaaagtaggggaaatcctcgaagatatgggtacaggggaaaaattcctgaatagaacagcaatggcttgtgctgtaagatcaagaatcgacaaatgggacctcataagattgcaaagcttctgtaaggcaaaagacaccgtcaataagacaaaaaggcaaccaacagattgggaaaggatctttacctattctaaatcagacagggaactaatatccaatatatataaagaactcaagaaggtggactccagaaaatcaaataaccccattaaaaaattgggctcagagctaaacaaagaattctcacctgaggaatacctaatggctgagaagcacctgaaaaaatgttcaacatccttaatcatcagggaaatgcaaatcaaaacaaccctgagattccacctcacaccattcagaatgactaagatcaaaaattcaggtgacagcagatgctggggaggatgtggagaaagaggaacactcctccaaagttggtgggattgcaagcttatacaaccactctggaaatcagtctggcggttccttagaaaattggacattgtactacaggaggatcccacaatacctctcctgggcatatatccagaagatgttccaaccggtaagaaggacacatgctccactatgttcatagcagtcttgtttataatagccagaagctggaaagaacccagatgcccctcaacagaggaatggatacagaaaatgtggtacatttacacaatggagtactactcagctattaaaaagaatgaatttatgaaattcctaggcaaatggatggacctggagggcatcttcctgagtgaggtaacccaatcacaaaggaactcacacaatatgcactcactgataagtgaatattagcccagaaacttaggatacccaagatataagatacaatttgctaaacgcatgaaactcaagaagaacgaagaccaaagtgtggacactttgccccttcttagaattgggaacaaaacacccatggaaggagttacagagacaaagtttggagctgtgacaaaaagatggaccatctagagactgccatgtccagagattcatcccataatcagcttccaaacgctgacaccattgcatacactagcaagattttgctgaaaggacccagatatagctgtctcttgtgagactatgccggggcctagcaaacacagaagtggatgctcatagtcagctattggatggatcacagggcccccagtggaggagctagagaaagtacccaaggagctaaagggatctgcaaccctataggtggaacaacattatgaactaaccagtaccccagagctcttgactctagttgcatatgtatcaaaagatggcctagttggccatcactggaaagagaggcctatttgacaggcaaactttatatactccagtacaggggaacgccagggccaaaaagtgggagtgggtgggtaggggagtgggggggatggttgggggacctttgggatagcattggaaatgtaaatgaaataaatacctaatttaaaaaagataactggaaagattcatgtattttaaaatctttgaggcacaattataaataagccatatatcagtgaaaaaaatgagattacattccaaagctgtaaaggatttacctgggaacatactggctcaacatacaatgataaataattaaatatgccttatggataaatgtcacaatgcagaaaagcatttcagataatctgataattagaagtggaaaactatacttttatagacttctctatgtatagatggtgtggccttgcatgtataaaattctaaataatctgcaaaaatgttaacattaatgaacaaattcagcaagtgcatacaatagaagatcattatccaaagattaatcacctctgcatgttagcattggacaaagtggacatgagggaaaagtcccttggaatctaaaggagcaggatgtttagaaaggaagcaaacaagtgtgtagacaaatttcatacagatcactaggcaacactgaaggaaattataggagacctatctaaggacgaagtgtgtgtctacttgaagactggatattagagataaccctcaaactagtttacaagttaatggaattcttatcaaaatgccagtttgccttttccccagaaactgcaaaacatctctaaattttttcatttgaaaatcctagtactactgaacagtcgagagagagagagacagagacagagacagagacagagacagagagacagagagagagagagagacagagagagaggaagaagaaaaagaaaaaagaaggaggaggagggggaggaagaagaagaagaagaagaagaagaagaagaagaagaagaagaagaagaagaagaagaagaagaagaagaagaagaaaagaaagagagagaaagaagaaaggaagagagagaaaggacaccctttttttaaatcatgtttcctgattttagagaaatgttctgaattgaaaataaattctttggctcatttctatgcattaaatacatagatactattttctatttaaatacacacaggaaagagtttttagttgtctgaggttgcatgaaaaattgataatgtcaaactacctccaaatgctttagaattagaaggttggccaatattaaattttggtttgcactatttgatttgtagctctttcactcagctctttcactctgatctattcatctctatctgtacattagagttttccaaaagacaattccctctgaaatagtttataataataacacaaactgctgattttaagcaagcaactttgttcttttggcactgtgagaaagcacttttagaaatagaatttactgagttttttttttacctgattattcaaaagttcaaagtatatgtgggaagaggagttgtattctactttgtgtacatggttcttcttatatatagtagtggatgaccttatctaattatgcagtataaggcaataacaatgttgccagagaacaaaaacaatatacactttcaacttgccattaatctgaacattaaaactgtgttttgacactaaagggttgtttgccttaaagctagaattgtatcaattatcccaaaaagacacagggtggcgctgcaggctaagattgtgattaaaaaatcactaaaatacccggaatcactgttgcaatacagaacaaaggaagcagacaagagctttgcaagcactatggagctatagagggtttggggcaagaatataatggattaatatgagattatgagcaacacggtgaagattcctccaaagagggaatcagaattcagtgtttcaaaacatttggagactgctacaggattggatgcaagcatgcatttcctcatcatggagaagctggggagaattcacctaaacaggcaagtaatggcatttatttttatgatggttttggttcaggtttgcagtgagccaacaattcgatactctatcttagaggaaacagaaagtggctcctttgtagcccacctggccaaggatctgggtctgggagctagggagctggctgccaggtctgcacgggtgttgtctgatgattacaagcagagattactgctggatcctgagactggagatttgcttctgagggagaaagtagaccgggaggaggtgtgtagcactgtggatccctgtgtgctgcatttccaggtgactcttgaaaagccagtgcaatattttcaaagagaattattgatccaggacataaatgatcatgctccagaattcccagatagagaactgctcttgagaataccagagaacagccagcaaggcacacaattttcactgaatttagcccaggacttggatgtgggcagcaatgggcttcaacaatacacagtcagccccaacccttattttcacgtcctcactcaaaataatagtaaaggcaaaaaatacccagagttggtgcaggacagaggcctggacagagaggagcaggcagagctgagcttaaccctcacagctctggatggcgggtctccaccgaggtcaggaacagccctggttcgaatcctgatcatggatatcaatgacaatgctcctgagtttgtgaacagtccctatgaggtgcaggtcctagagagcagtcctccagactccccagtcttgactgtcttagcacgggatgcagatgctggcaactttgggagagtttcctatggcttctttcaagcatcagatgaaatccaacaaacattctcaataaacgcaactagtggagacatgcgattgaaaaagaaattggattttgaaaaaattaaatcttaccatgtggaaatcgaggccatagatggaggtgggctttctgggaaaggctctgtaacgatagaggtggtggatgtgaatgacaatgccccagagctgaccatatcttcactgaccagctctgtcccagaaaatgctcctgagacgatcataagcatcttcagagttggggacagggattccggagagaatggaaagatggtttgttctattccagagaatctgccatttattctgaaatccaccttcaagaacttctacaccctggtgacagagagccctctggacagagaaagcagagctgagtacaatatcaccatcatggtctctgacatgggcacacccaggctcacaacatggcacaccataaaggtgcaggtgtccgacatcaacgacaacacccccgccttcacccaaacctcctacaccatgtttgtccgcgagaacaacagccctgccctgcacataggcaccatcagtgccacagactcagactcaggctccaatgcccacatcacctactcgctgctgccgccccatgatccggaactggccctctcttcgttaatctcgattaacgctgacaatgggcagctgtttgcactcagggcgctggactatgaggccctgcaggtcttcgagttccacgtgggcgccacagatggaggctcacctccacttagcagccaggctctggtgcgcgtggtggtgctggatgacaatgacaatgcgcccttcgtgctctaccctatgcagaacgcctcggctcccttcactgagctgctgcctagagctgcggagccaggctacctggtcaccaaggtggttgcagtggaccgcgactctggccagaatgcctggctatccttccagttgctcaaggccacggaacctgggctgttcagcgtgtgggcgcacaatggagaggtgcgcaccaccaggttgttgagtgagcgcgatgtgcccaagcacaggctactgctggtggtcaaggacaatggagagcctcagcgctctgccagtgtcactctgcaggtgctgttagtggatggcttctcacaatcttacttacctcttccagaggtagcgcgggatcccgcccatgaagatgaggacgtgcttacattgtacctggtcattgccttggcatctgtgtcttctctcttcctcctgtctgtgctgctgtttgtgggggtaagactgtgcagaagggccagagaggtctctctgggtggctgctctatgcctggtgaacactttcctggccacctggtcgatgtcagtggagcagggaccctgtcccaaagctaccagtatgaggtgtgtctgaggggcgactctgggactggtgagttcaagttcctgaaacccatgatccccaatgctgggatagaaattatggaaagtccccactgcagggatagctttgtattcaactaagtaatgaatcttaagaattaatacacttttatatggttaagtgtaacattaactaactttaggagaaactaccttgtgcatgtctccaaccgcttttgtttatcttattcatattacgcacgcttagtctgccattataccacatgttaaatgtgggttttctacatgttcagtgtctttggtgaataataatctcacgactacaagtagctcaagtagcatagaatttcctcaagtgactttaatgctcatatgaaaatttgaatttctgtataattatgacacctgttctaactgtatcttctatatttttaagatcagaatgcttagaattatttggccttagaatacttattttttcccaaatcatgtcaagatgcacttcattagaacactcagttgtgacacttgtcgtgagcatcataaatgtttgtcattcttttcatgaaataaagttgttaatccattgcttagcatgatttttttcaaaaagcaaaatccattctgagataatgaagcaccggatttatcctttcttacctcacacttggcagaagctaaagcgtaaagttatgctgcatcttactgtagcttgtggtgtcttccaataggagaaacttctgcattctgacagtcttgttcagagcttattattgtgacataatattcttgtgttttgtcatttggtagctatgagttctttttaaaatcaacaatagaatcccctttactattttaatttcttctttgatgtttaatgtgacttaagttatttttaacttaaattctcaatcaaatgaatttgccattctagtaaataaatattgttttgctcatgattgaacagaagagcatgtattgtattataattgtttatgctatattcagtggatctagtatacaaattgtgtgattctacctaactgtatttatgtcaatgtgactgtaaaacagtcagtaaagtttagacaaagaaatgaggagttaaaaagctttttctatagcggggcataatggtacatgcccttaattccccagaaccggcaggtctttaagttcaaggcctggtcttcaatagtaagctccaggccagccaatgttatgtagcaagaccatgtcttgaaatgtaaccagatactggagtttgtgttgccttactcgacagaagtgtcagaagtggaatgtttacatcactttatttagagaactgccaatctgagaaggcagcaagtcaacaccctaaaaaccactttatgtcttgcttccaggcagcagattacacaggaggaaggtgaatgtgaagcagcaggtcattcggaatttagtctctgggcaggtggtcagtcacttttttttagagttgtgatatctttgtttctctcattatcatcacctgacctcttccctcattctgtggataacaagtgcaggatcttcttctgacaggtttatttacactcgctggatttatcctgaaactcttccaggggcatctagacaggaatggtgtggtaactctgaacagacaagttaatcatgtaaacatgtcaagctgttcatagtatgtgagttatatagtcctttttacagcatggactacacatagtgcctttatacagactacatatgagagtgctcctatcattcttctctggtctctgttgcttgaagtttacatgaaggatctggtaagagaaaacaatcataaaagcaggtgaaaggtcagaaaccattactgttcagccacagagatcatgctgtgtgataattgggtgggcttaaatcactgagaatcaaatcccctggggatgagcaacaagtcctattgtctgcttgctcccaaagaagtttgctgagtctgagcaaacaacaggttgtttgctcacagagacagagtaaatagggaaacttaagtatattgaagattgaagtctagttccttctctcaggacatgtactcaggaagaacatgcacaggtaaatcaagtggaaatttctggtttctttggagactcagttgtgtcatgtgatgtttgtctagaaactgtctttagaggattttttcctgaagcagacacatcgcaggatgttttgttgagaacaggcatgtggtgtttttctggcagctgcctagaaaagggagcatgtgatgtttttctagagcagatgctgggaagaacacatgatatttggaaagggtataaatataatccaacaaacagtggcgatgctgtgtggtattggttcgccttgctatgctttgctagttattgttgggctttgctgaccatggtctttgctgacaatgctgtgtgatattagttcaccttgccactctttgttggtcatcatttgttgtgacttcatagagagaaatgcaccacagaatttctggtggtgttccagtgccttcttgatgcttccatgatctcaggctgattggtagaccgtcaaggttttgtttggatcaaattgctgttactgatttgtgaatggtgtttgcaagtgctgctgattcctatgaactgaactggtgatatcctgacaaaacatattagatttactacaaagaactatttctaaacaggtccacatcccccttcgcttaacctttcctttccactgcctctggtgggtagtgggctagaagaaaggttaaaacatttatgtacacttattaaagattttgaaaaatataagcctacagttaaaacctaagaacctgaatgcagaggcaggaggacctctgaaagttcaaaacagcaaaatactgtttttcttgctatgcaaaaattagagtttggcctggagtaggaaagagatatcaagaatccaagttctcaactggatattaagtagtgtttgctgttcaccaggcctgaaactaaccgtaattaagcacaatgcctgtttagattagaataatttgattagacctggctctaccatgcaaagctcaaaaggacttctctggagggaaaataggagcttgatcttaggttaagttttcacataaacatccagtcttcagtaaaaagattcagtgtaagccctactacttagaaacaagaataaatgaagagggaaaacatttgacttagaaggctcagatcttagactgaaagatagtattaaaaattcaacttaagggctggagagatggctcagtggttaagagcatcgactgttcttccgaaggtcctgagttcaaatcccagcaaccacatggtggctcacaaccacctgtaatgagatctgacaccctcttctggtgcatctgaagacacctacagtgtacttagatataataataaataaataaataaaaagaatttaaaaaaaggcagggcgatggtggtgcatgcctttaatcccagcacttgtgaggcaaggcaggcgaatttctgagttcaaggccagcctggtctataaagtgagttacaggacagccagggctacacagagaaaccttgtctgaaaaaaattcaacttcaataattaattaaattgattagtagggacatgacattggttcagtgaatgaaaggtcctgctaccaccaagctcaaaacctgagtttgttctctggaacccaaaatgtggaaagagagagctgacttgtgtaattgtcctcttgacttgtatacacacacacacacacacacacacacacacacacacacacacacactgtgtcatgtgcatgtagggttagggctcccaattctaaaactggtaaacaactgttcaagatgttttatgaaattccaactagacaaatgatgtgggaatttctggttttgttggagacttagttgtgtcatgggatgtatttttggaaactgtcttatgagaagttttgtgaagaacagacatttagtatttctgaaaggtgactgttgaaagggtatgtgatgttttactggggctgacaattgagaggacacatgatgtttagaaaaagtataaatataacccaacagacaatggacaacagtcttgcattggttcaccttgacactctttgctggtcatcgatgggcttcactgaggctggtctttgctgatgacactcttgcattggtttaccttgctttctttgctgatcttcgcttgttgtgacttcatagagaaaaatacatcaaagaacttctggtagtattcctgctgcttcttgactcatgctgatcaacatagccttgcagttccttctagatcaagccactgctactgattcacttttggtctttgcagagtagactggactattactgttgattaatgtttggtgttttgctagtggactggactgctaataatgaatattggaatcacctcaaaaaactatttcaaaacaggcccaccacctctctttcctattaaacttttttcccttacctttagtgggtggtgggctagatggaaggtcgaagcattaaataaccataattaaagaaggttttgaaaaatctaagcctacagacaaaaatcaaaacacaccttaggagaaaataagaaagtacactatccaagtcaaatagaaaagcaaaaagtattctaccaatcacatgaagagataaatttcattaaagaaacatcggagaaatggagcaataacttctcgatattatgagaccaacaacaaaagagtcatgttttaacatctcaaaagaaacatttatcatactagaattctattatgagagaatagaacctcaagaaaatgaagttttcagacaaaggatattagtaatatgaacactgaaagaaatatgttagagaaactacattttaaaaaagcattctagaagagactgtagaactgtaggaagaaagaaaatgactggaaatgaatagtgattgagtgttgattatgcagccaataagaatagggagattaattattgtacaccattgtagatgaagattcattgatgaaactttttaggtaacttctaaataatgatttaaagactaattgaaagaaaattaaaataaaaatatttgaataatataggaagaacaaaacataggggacaaataaaaatattgtctaaacatagagaagatacattatatagtacatcaattataattgaattaaaattaaacctaaattatcatactacatttaagagaaatgtagattacatacaaccaaattgaagatgctacaacaaagacacaatctatggaacaagaattatactatcaatgattcaaataaatcttttctcctgaaaaatatcctatgaagaaaatgaaaaaaaaaatcaagctgtagattgggaaactgtttcaaagaacttatttcagagaggatgactacaaacagaatttaagaactcaacaacaacaacaacaacaaaaaacactgccatgtaaaagtgctccaagacacacaggtggtcaatatgtacatgaaaagctgtgacacattgtatgtcattcaagaaatgccaattcaaataatattgaagtacccaaacacaactactagaatgtcccgattgcagaacaccaacaccatcaaaggctgaggaggaggtggagcaccaggaactctgattcgtggtaatggggatgacaactgatgtagctactttggaagacagttctaagtttcttgaagcactgagtgtcttctcactgtgtgatccagcaagcatgctctacaatatacatgaaaagaaatggaaaacacatccacacaaaactgtggacacctgtgtttctggaaacatccttgagaaacatcaaaacttaaagcaatggagatttcccactagatcagtagataaccacattgtggtagaaactgaaaatgaaggtttaacatcaaaaagagccatcccctcatgaaagagcattgcaagaacttaagtgcatgtactaagctaaggactccttctttgatagccacatgacattttggaaaaggagacagctgtggtgacagtaaaaatatcagtgatttcaggaaattcaggaaagccagggagaaataggaaaatttaaaagatttggagtcccaagaaaccaatctacttgtccaaagttatggaatacacaacatcagaggaaaacagtagtttaaatttgggcttgatggtaaagatgtgtaaacggaagctggaaatagttcagtggagaagagtgcttgctgttcttcctgaccttagtcctagacctacattggacagcttattaattccagctccaggaaatccagtagcctcttctgacacctacacgtaattggcatacagtcacatagatgtacagaagaataaaataaaaataaatagctttaaaaaaatatgttagctgggtgtggtggtgcagttctttaatcccagaactgagaggcaggaagatctctgtgagcccctgtgagcccaggttagttgattctgtaggttttcttgtagtgactttgacccctctggttcctataatccttcctcccctttagcaggattctctgaacctaatgtttggctgtggatctccacatctgtttccattagttgctgggtaaagcctctctgatgaaaattgggttgggcaccaatctcatagcaggggtctcaatatggaccaatcattggttagccactcccacaatttctgtgccacctttatcccagcacatctctcaggcagtaaaaattgtaggtcaaatattttgtggctggattggtgtcccaatctcttcactggaagttttgcctggttacaggagatggctggttcgggctgcagcccttatttctcagtcttagctagtgtcaccctcatagattcctggatgtttccattgcacttggttttctatctcacctctgagatgttttgctgagaacagacacgtggtgtttttctgaaaacagcctggaaagggggcatgtgatctttgctagagcatatgcttgagagaacatgtgatgtttggaaagggtataaaataatccaacagacagtggatgatgatgtggcattggttcaccttgccactctttgctggtcattgtttgttgtgacttcacagagagaactgcatcaaagaacttctggtggtgttgtagaggcttcttcatgatttctcaaacttgagccaattggcagagcctcgaggttttctctgaatcaaattgccattcctgattcatgaatggtgtttgggactggatcaagctaccactgctgatttttgtgaagtggcctgctgatatcctgacaatccttattgaattcacgtcaaagaattctttccaaaacagatctacatcctcctttgccctatttaacttttcctttccactacttctggtgggggtatggctagaaggggggttaaagcattgaagtccccttattaaaagtaggctgtgaaagaaatcaaagtctacacacaataacccaattcctagaaataaaaacatattacagaaaaatggtaaatataatatttgtcatagcattaccctttaataaagttaaaaactgaaaactaccattgtttagaaactgcagtagccaaaatgaatcaaggcatacttctacagaagagtaacataagacaatggagagaaagcagttagaaaaacttgtcacatatgacttcacaaaatcaatgtctatcaactagcacaagagaggaataatctattaacccatcttataaaactcctaacaaagatgagtaatgtgtaatggtagcactcaatatgctgcttctgtatagttgaccatcaagtaatagccacagagagcatggccggtttggtacattttaggttggtttttttttttaatgttctgctaataccaacttattaatcataggatatattcctgttgtgtgccttctgaatgtatttcctatatcacaacaaaagtgtataaattcaattatttctggttaaaattaataagaaacactcagcttaataaattataagcccataaaaagttttttttataatttcaaaagaattttgctaacactagtatacaatattaacatattatattatgaatgtttccacgtactttcagctcagaggtatgagtaggatactgatatttaggaggtgacataaataaactacaggttacagctaaaactcaaaactagggtttgaattcatgatgactaaactacatgcaatcatgaaaagggacacttggtggcgctgtcgactaagggagagaattatgggtctacatatacccagaaagccactgaaagctggaaaacagaacgctttctactccctagaagaagaaggtatttgagcgtgatctaggggagaaatctccgcgggcagtaagacattaaagattaaattcaaggatattttaccatatttctttgtggattgaaactgactagaagaagaagcgccctctggactaaatcagaaaaatggagatgacactagcaaaaacgccagagaacaggcaagtccttttttttactatactattgctattatggaagtcttgtgccgatgcaattatatattctataccagaagaaacagagagtggctatttggtggctaatttggcaaaagatctggggctccgagttggagagctggctattaggggggcacgaatccattacaaaggaaacaaagagctcttgcagctggatgcagagactgggaatttattcctgaaggaaaaaccagaccgtgaggtgctgtgcagggcgacagaaccctgtgtgctgcacttccagatcatactggaaaaccctgtgcagttcttccaaactgaactgcagctcacagatataaatgaccactctccagagttccctgaccggaaaatgctactgaaaatccctgagagcgcccagccagggacaacgtttcctctgaaggcagcccaggaccctgacatagggagcaatgctgttcagaactacacagtcagtcccaacctccatttccatgtggttactctcagtcgctcagatggcaggaaatacccagagctggtgctggacagagccctggacagggaggagcagcctgaactcactttaatcctcactgctctggatggtggagctccacccaggtcaggaaccaccgaagttcacattgaagtcgtggacatcaatgataacgccccccagtttatacagtcactctatgaggtgcagattcttgaaaatagcccccttgatgccttagttgccacagtctctgccagggatttagatgctgggatatatggcaaggtagcctactctctgtttcaggatgatggaatatctcaaccatttgtaatagatgaaatcacaggagaaattcgtcttaaaggggcactggattttgaggcaactccgtattataacatggaaattgtagctacagacccaggaggcttttcaggaaaatgcactgtggttatccaggtggtggatgtgaatgacaatgcccctaagctcaccatatcttcactcaatagttctatcccagaaaatgctcctgagactgtagtggctgttttcagtgtttctgatccggattctggggaaaatggaaggatggtgtgttctattcagaacgaacttccatttcttttgaagtccacatttgagaactattatactttagtaacagaggggacacttgatagagagagcaaagctgaatacaacattactatctccgtcaccgacctgggcacccccaggctcacaacccagcacaccataacagtgcaggtgtctgacatcaacgataatgcccccaccttcacccgaacctcctacaccatgttcatccgggagaacaacagccctgccctgcacattggcaccatcagcgccacagactcagacgcaggctccaatgcccacatcacatactcgctgctgccgccccatgatccgcagctgaccctcacctctcttgtctccatcaatgaagacaatgggcagctgttcgcactcagggctctggactatgaggccctgcgggccttcgagtttcatgttcgcgccacagaccgtggttcacccgcgcttagcagccaggctttggtactcgtggtggtgctggacgacaatgacaatgagcccttcgtgctctacccgttgcagaactcttctgcgccctgtaaggagctagtacccagagctgcggaggcaggttacttagtcaccaaggtggtggctgtggaccgcgactctggccagaatgcctggctgtcattccagttactcaaggccacggagcccgggctgttcagcgtgtgggcgcacaatggggaggtgcgcaccaccaggctgttgagtgagcgagatgcacccaagcacaggctgctgctggtggtcaaggacaatggggatcctccgcgctctgccagtgtcacactgcatgtgttgctggtggatggcttctctcagccctacctgcctttgtctgaagtcgtgcaggatcccgctcaggaaggtgatgacgctctcacgctgtacttggtcattgctttggcatctgtgtcttcacttttcctcatttctgttctgctcttcgttgggatgaagctgtgcaagagggccaggtcgccttctctgggtgtctgctctgtgcctgagggccactttcctggccacctggtggatgttagcggaactgggactctgtcccagagctaccagtatgaggtgtgtttatcgggggactctgggactggtgagttcaaattccttaaacccatgatctccaacttaatggttcaggaccctgagagagaagtgaaggaaagtccgcactgcagggatagctttgtattcagttaattgtatgttttagtgaatttgtttttgatcaatctattgcaatatggttctcttaagaaagtgaatcattttaactaagtattagcactgtagtcaaagtgtatgcatgtcctccattaccaaagtgtttacttagttcacaatatccactgtacttaatatttttaattttagtagatattaaggacacaacttatgttttgctttagctcaagtattacacaataaaattttatgtcttctgggttttttgtttgtttgttttgctgttttctgttcttttgttttgttttcaagacctcttgctatgtagctctgactatcctggaactcacaatgtagacccggatggcctctagaagacatccatctgtctctgtccccaaattgccagatactttacctgttttaccacataatttcaattttatgtccaaggtgtttgcattttatttctctatttaactatattttgtttctattggatatttaacataggatctcttacatactaaacacccatctgttagtgagcttttatcctagccaaggtcattttagttactctgagtagccatgagcatatttgtcttctgaattataaacttctgaatataattataaattatataaataatattatttataaattacaaatataaatattattatataaattataaattattatttaataattcagaatatttaataattcagaattattaaatcattatgtcagaattatttagacataattgactaaatgtcccttattaaaagattgcaacactagagttgtacttttttattcttatgagaactacacatgctagagattttctgcattatttgttcaccacatacctagcacatcgttctataagtaatattaattttagcaatttcctttgtaaatatgaaagatacaaccttctatgttaataatttgtcatctctgttactaaataaaagtgctaagagagtaagactataatcagtagtagactatccatgtctgtcaggccctaggtacatgcctcagtcagggtttctattcctgcacaaacatcatgaccaagaagcaagttggggagaaaaggatttattcggcttacacttccaaactgctgttcatcaccaaggaagtcaggactggaactcaagcaggtcagaaagcaagagctgatgcagaagccatggagggatgttctttactgtcttgcttcccctgacttgctcagactgctctcttaaccaagactaccagcccagagatggtcccacccacaaggggcctttcccccttgatcactaattgagaaaatgccttacagttggatctcatggaggcatttcctcaactgaagctcctttctctgtgataactccagctgtgtcaagatgacacaaaactagccagtacagtacatttccaagcaaaaaaagaaacaagcaaaccaacaaataaacaagtcctgttaaatcattgcttgacacaatcctactttaatactaatctgaataagagaagtaaccactgaggtcctccaaagaatctaggctttaatgatctcattttgttgaagaatttctttttattcatccttttgttctacaaataaaagtataaatatagcctttgtgggtcttgtgctaatctcagttgtcaactttagatgtagaacctctgggcacacttatgaaggactatcttgcttaggttaattgaggtgggatggccagccttggaagaccattgtgggcagcaccactccctgcgctgggatcctggactggatgaagaggagaaagtgggctgagcacaagtgtgctgctctcttcttcctgcctagatatgcagtgtgaccagttgcatcaagctcctgtcttttagattcctcatcatggtgtgatcctgaactgggagccaaaacaaaccttccttccataatttacctttgttgtggtattttatcatagaaataggaaaaggaactgagtcagattgcatggtcgcatggtgccgaatatcatatccagagagttgtgcagtctaaacatactgttcacaacagccctgtctctggtttatattaatacacgtgtttcctttgctttccccacagcttctcttcacctttcaaaagacccaggggatttctggaaatttcaacagtctatctgatcctgggtattagttctcagaaaatttcacttcatgttgttttgtagatatggaaagcaagagacagttccttcaatgatatttgattaattcctaatttgttatttggtgcaactttacagaattttcagtcaatttagtttttcaattgtgctgattattacataatacaaaagtatttgttcttaattggtttgaattgtaatgaatttaactgaattatgaattacttatattcagtgacctaaataaacttattatgtgatttattttttttttatttttaaatacgtaagtttgtgtggatataactgcaagaaagctttgttgaactttttgcagaatataagcaattgaagggtttagattataatctaatatctgtacttaaatgttttttctttttatgcactcactgcacaaaccagtgggtttccttatgaatttgtcacacatggatataatgtatacacattaattttgtttaccctttatttggttcttatatctcaagcatcactcctctggagtttaaatatttgcatctttgcctgaaataatgtttccccctaaggatataatgaaatataaaagggaaatagatgaccatttcttatcctggatatgtgagttttggttatttgacttcaaattttaagtgatgtaaaagtgagaaaaactaaggactaacaaaactatcgataagacttaaatatgagaaacaactctaatggcttgcccactttgtgacaaataactagtcaggtgtggtgtctagcattcaaaatacccacccgaagtaaaaacaaacaaacaaacaaacaaacaaacaagctgttagaggccaacagaaaagcctcataggtaaaagtctctaggttcaatcttcccagcattggggagaaatatttcctctcttacttctagatctaaagtcacaaaatatattcattttaaaatatgaagttaaagattatgcatgtgtttaatagaattccattctaacttagatggaatatctgacagcagaaagcaaccaaatattgactaaatgtcatattttatctcttcaaaacaacaggaagcttatatattataagctgagacagttatctcaaagaataatccacaggtgcatgatatagacagtaatttagtagctctgacagaagagaggactcaagcccagggccagttttccttgtcacttgtcacctcagcacccaggagagaagactaaaagagtaacttgaaaattctctgaaggcataatgagatcctatacaaagtacacagagtagaggttgggatctctctacaaaacaactacagagaattcatgtttgcaacttgaaatttgtcatggtcaggcgcttggaagagaaccctgactcagctcagcaactgtttggattagagtgactgcacaggatagtgctctatcgagctaagagcaaagggcgagctccttccagaggaggataatagaatcatgatcatcacggattttatataaacatccagcaatcagtagatgcacatcactgactggataatataaagaaccaagaagagaaaacataattctctgacgtagaagatttgtatgcaaaaatcaactaacaatgtcaacaaaataagaatgattagtagatgtgaaacaaagaacaattaagcaaataagtaaaaagataatttcataagagaattgaaatttaatactgaaagtcatttcataacaaggaattttgtgtataaaactatataaatggtacatcacaaaaatgaacaaattcagcattactatatgggaagcatgattataagagttagctaaaataaataaggaggaaaaaggcttgaagaaatggctcagagtttaagagcagtggatcttagatcagttgtcagcacctgctgcttgtcaggctaccacagctgcctttaactctacctctgatggatcccacacccttttgaaagatagtcacaccctcaagacatacttatgtacacacaaacaccgaaaggagatcaaggggatacaaattggaaagcaagaagtcagtgtgatagtatgcataagtaacccccaaaacttcaacagagaactactacagctgacaaacaacttcaggaaagtggtgggatataaaactaactcaagcaaatcagtagacttcctttatacaaatgataaacagggtgataaagaaattagagaaacaagaccctccacaatagccacaagtagtctagaatgccttggtgtaactcttaccaagcaagtgaaagatctgtatgacaataacttccaatccctgaagagagaaatctaagacctcagaagatggaaagatctcccatgctcatggattgaaatgattaacatagtgaagatggccatcttatcaaaagcaatttaatctacagatttaatgcaatccccatcaaaattccagcacaattctcacagacatggaaagagcaattctcaacttcatatagaaaaatgaaatgtccagtataaacaaaacaattctcaacaataaaagaacttctgggagagtcaccatccctgacttcaagctgtactacagagcaatagtgataaagaccacatggtattggtacagagacaaataggtgcatcaatagaatagaatcaaagacccagaaataaaaccacacacctatgaacactttatcagtgatgaagaagccaaaaacatacaatggaaaaaggaagcacttcaataaatggtgctggtctaactggcagtcagtatgtagaagaatgaaaatagatccaaatgtatcaccttgcatgaagctcaagtccaagtgaatcaaggacctcaatagaaaaacagatacactgaatctaatggaagtgaaagtgggaaagagcctcaaactcattggtgcaaaataaataaaaatatatttttaaaatatgaaaaggtgaggctggggagatgacacactggttaaggtaacttcgtgcttttcccgagatctcaggtttaaggatccaacaaaactatctgtaactcttgtttcggggggtttatagttttctggctgcatggggacccacaaaaggaactattattcaacaacaaaaatgagctattaacctacagaaagccattgaaaaacttaggtgcacatttgtaagtcataaaagctaagttgaaaaaacccaatactgtaaaattctgattatgaaattcttgtaaaatgtaaaattatggggcagaaaaattttcagtgagttccaaagattctaatgagaatggagaggaaaagatatatttaccggatggggttggggagagacagtgaatctattctaaaaacacgtgcatgtaggattaaatttatttatgcccatgggctgtattaggaccaagagggaacctgaatttaaaatatggactcagtggtaaacaagtagtctcatgaattgtaacaaatacaccagtgtgccagggggacctttaatgaggaaggttgtacaggtgtggagagggtgtgtcagaattatctgcatttcccattcatttactgtgattttaaaactactcattaaaagtagacttaaaaaaaagaatttgttgccaacaaaatctgtgatgaatctggagtaatgaagacaacatggtagtacacgatcttcagagagatgactggtacactgggcaaccctgtaaccaccgtggtttaggacaaggatagaccctcaggagggaggaaccaactttgtaacgcgatgtattgaaatttggaaaccaaactctccaacttagttcattcaaaacatattttaagtttatagtatgtctgtgtctgaaaaggaaactttcaaaatatacacatctctttaacgaccctgacttgtagaaacctaaaagtactaaacaaaattgagcagtaacaccaaacctaactgaacacaattaagatgtttcattgaccaaagcacaatgtcatcaaaattcaagacatacagtggaaaatatttgagtacatacatctgaaaaagaaattatacccagaatatacaagatacttcttcaaaccaacaagcaaagaaacagaagccccatatcagaaatatacatatacatatacatatacatatacatatacatatacatatacatatacatatacatatacatatgtgtgtgtgtgtgtatatatatatgacatgaacaaccatctagaagacagtaacctgatggccagtaaacatgaaaatttcatgaatgatagacaaacgctaattaaatttaccctgttaagtcacaatacaatcattagtgttctaaaaattgaaatgacaagaccaagtgataacagagatgtggagcaaccggaactctcccgctttggtggcctttatacaactacgcatgaagaatgtttattctttgaagaactaaagtaaccaaaccatagcagaccaggatctcttggaacttggcctattttataattatcaaggcacagctaaataacatttaaaaattcaatgagtgacacaattatcacttttttctcctttctgaatgtatgaatatttcaaatcaaatattaaaaggtgtaaagataattttctttatatttattatatttaccttcttgaacaaaatcgaattgtagacctaagaaagaaggtggattcagctcctcgggactcttaccaggtaaaaaagaatggcatcttggttgtttttaaatgtattcttccactcaaaacttaattcagtaaaatcatactagaactttcagttgatgaacatggagcttgcaattcaggctgtgtgtgtaaactaaaaggatactgaaacacagcaagttttaaattggaaatgaagcgacaaaatgatgtgcaaaagcaaataaggacacttggtggcgctgcaggcttaagagtgtcaagaatgagctctgcagacacccaggaagccatctcattaagtcgagacagaacgatggcagctgcttgaagaagaaggtaataagttagggtttatagaagaatctaagaagacggcgtcttcctagtcggatttactccaatatctccgcggacactcagcagtggactgtaatcaaccagaagcagcagcaccctctggactgaatctgcacaatggagacagcgctagcaaaaatgccagagcaaaggcaagtcttttttcttactatcttgttgctgttgtggaagtctggctctggggcaactagatattccatgccagaagaaaaggagagtggctatttggtggcaaacgtggcaaaagatctggggctcagggttggagaactggccactagaggagctcaaatccattacaaaggaaacaaagagctcttgcagatggatgcagagactgggaatttgttcttaaaggaaaaactagaccgggaggcactgtgtggggcgacagaaccctgtgtgctgcacttccaggtcatactggaaaaccctgtgcagttcttccaaactgaactgcagctcactgatataaacgaccactctccagagttccctgacagggaaatgcttctaaaaatccctgagaacgcccagccaggaactgtgtttcctctgaaggcagcccaggactctgacatagggagcaatgccgttcagaactacacagtcagtcccaacatccatttccacgtcattactcacagtcgctcagatggcaggaaatacccagagctggtgctggacagagccctggacagggaggagcagcctgagctcactttaatcctcaccgctctggatgggggtgctccgcctcggtcaggaaccactatagttcacattgaagtcgtggacatcaatgataacgccccccagtttatacagtcactctatgaggtgcagattctcgaaaatagccccattgataccttagttgttacagtctctgccagggatttagattctgggatatatggcaatgtagcctattctctgtttcagggtgatggattatctcaaccatttgtaatagatgaagtcacaggagaaatccgtcttagcaaagagctggatttcgagggaattagccattataacatagaaatcgcagccactgatgggggagaccttttaggaaaatgcactgtggttatacaggtgttggatgtgaatgacaacgctccagagttgatgatcaggaagctcacagtccctgtcccggaaaattccgccgagactgtagttgctgtttttagtgtttctgattctgattcgggggacaacggaaggatagtgtgttctatccagaacaatattccatttctcctgaaacccacgtttgagaattactacaccttagtgaccgaggggccacttgatagagagagcagagctgagtacaatatcaccatcactgtctgggatttgggcacacccaggctcacaacccagcacaccataacagtgcaggtgtctgacatcaacgacaacgcccctgccttcacacaaacctcctataccctgtttgtgcaagagaacaacagtcccgccctgcagataggcaccatcagcgccacagactcagactcaggctccaatgcccacatcacctactcgctgctgctgccccaagacccacagctggcccttgcctcgctaatctccattaaccccgacaacgggcagctgttcgtactcagggcactggactatgaatccctgcaggccttcgagttccgcgtaggcgccacagaccaaggctctcctgcactcagcagccagactctggtgcgcgtggtggtgctggatgacaatgacaatgcgcccttcgtgctctacccgatgcagaacgcctctgcgccttgcacagagctgctgcccagggaggcggagtctggctacctggtcaccaaggtggtggctgtggatcgcgactctggccagaatgcttggctgtcgttccagttgctcaaggccacggagcccgggctgttcagcgtgtgggcgcacaatggcgaggtgcgcaccaccaggctgctgagcgagcgcgatgtgcccaagcacaggctgctgctgctggtcaaggacaatggcgagcctcagctctctgccagtgtcacacttcaagtgctactggtgaatagtttttctcagccctacctttctctgcctgaggtggcacaggaccccattcaggaggatggagagatgctcactctgtacctggtcattgccttggcttccgtgtcttcgctcttcctcttgtctgtccttatgtttgtgggaatgaggttgtgcaggagggccagggaggcttctctgggtgtctgctctgtgcctgagggccacttccctggccacctgatggatgttagcggaactgggactctgtcccacagctatcagtatgatgtgtgtctatcaggagactctaggactggtgagtttaaattcctcaaacccatgattcccaatgtaatggtccaggaggctgggagagaagtgaaggaaaatcccccctgcagggatagctttgtattcagttaactgttgtatttgtttcggtgaatttgtttttggcaaatctattgcaataaggatcttctaggaaagtgaatcattttctgagtactgacactgtaatcaaagtttctagggctaaggtgtttgcatctttttcacttcatgttttgctattgatatcaaatgtaagaactcttatatgctaactatacattctattagtgagcttcactcccagctgaaatcccttttactctgagtatctatgaccatatttgtcttctgaactataagccatcactgaattaagatatttgagttgtgaactttttattcttataagaaccatatatgctataggttatctgcattattttgctcaccacatatctatcccattggtctatgaattatattaaaatttaaaatctcatttgtaaacattaaagaggaaacatataatttttcatctctgtcactaaataaaggtgttaagactctaagagtataatcagtggtagatcatgcatgtctgccaggcatttccaagtaacaaaaagatacaagcaatccaacatagtcaaattctattaaataattgcttgacacaatcttgttttaaaaactaatctgaataacataattaagttcctccaaagaatcaagacttaattgtctcattttattgaacaatcattttttgtttatccttgtatttcagaaataaaagtgtaaatgtagcttttgtgggtcttgtgttaatctcagttgtcaacttgagatctagaacttctgggcacacctacgatgcatcatcttgcttagttaactgaggcgggaagttcagccatggaagaccattgtgggtagcataggatccctgtgctgggatcctggactgtatgaagtgttactatgagcacaagtgttcattgctttcttcttcttgcttgagatgcagtgttaccagttgcttcaagctcctgtactgcaccttacctaccatgatgtaattttgaactgagagccaaaacagacctttccaaaatttgcttttgttgtgatatttttatccttgaaataggaaaaataactgcatggttgcatggcactggataacatacccaggaactgtacattctaagcatgatactcactgtggccttgtctctggtttatatcaatacacatgtttcctttggtttccctgcagtttctcttcacctttcaaaagacccaggaatttctggaaacttcaatactctatttgattcttgttattagttctcaaaattttcactttatgttgttttgtagatatagaaagcaaagcaatttgttgtgatatttaattgcctcctgctttgttatttggtgtaatggtgaagcattttcagttaatttaatttttcaattgtgctgactattgcacactacaaaaatgattggttcttaattgatttggactataatgaatggaacagaattacaaattacttacactctatgacttaaataagcttatatgtgatttccaactagttaaggttttgtgggtacaactgcaaaaaaaaccctttgttaaagtttttgcagaatatgaacaattgaagagcttggtttaaaatctacatttatatctgttgctttttaattggtatgcattaattgaacaaagaaatagatttcttaatgaatctttcattcatgtacataaacattcaacatgtttaatctttatttgtttttaaatctcaagtgtaatttctctggagtttttgcaaacttccctgaattaatgtttccccctaaggatataatgaaataaaaaagaaagtttctgatgatttattttcttagaaaactaatttataaatatatcaaaaatatacttaagtatgatagacaactctaatgacttacccattttgtgccaagatgcctattctggtgtggtgttcagttctcagaatggccacctcttgtagctgtggtagcccaacaggcatgcatttgcctcataagtaaaagtctctaggttcactctcctcagcattagggagaaatactccctctcttctttcaggatcaaaagtcaccaaatataatcattttaaaatatgaagttaaagattatgcatgtgtttagtagaattcccttctaacttagatggattatctgacagcagaaaacttccataaaaattggctaaatgccatatgctatcttttcaaagcaacaggaagctgattatatgagaactgagtcctacagacagttatctcaaagaataatcaacatgtgcatgatatagacagtaattcagtaactctgacaaaagagaggactcaagcccagggccagttttccttgtcacttgtcacctcagcacccaggagagaagactaaaacagtaacttgaaaattctctgaaggcagaatgagatcctatacaaagtacacagagtagaggttgggatctctctacaaagcaattacagagaattcatgtttgcaacttgaaatttgtcatggtcaggcgcttggaagagaaccctgactcagctcagcaactgtttggattagagtgactgcacgggatagtgctctattgagctaagagcaaagagcgagctccttcctgaggaagataatagaatcatgatcatcacggattttacataaattccagtgatcagtagatgcacatcacaaactggataatataaagaaagccaagaagagaaaaaataaatttctgacctagaagatctatatactaaaatcaactaacaatgtcaataaataagaagagttaatagttttaaaacaagaaataattatacaaataaataaaaagagaatttcataagagaattgaattttaatactgaaagtcaattccttagcaaagaatgtctatataaaactatataaatgctaaaacttcacagaaataaataaggaaatagtggatgaaatgcatactgacatgagataactaaaatgaattcagaaaaaaatttaaagccttgagatggctcaaaatttaagagcaagtggatctgaggtcatagttcagcacacactgtctgtcacagctgcctttacctctacctctgaggaattcaacaccctctttaagaaccttcacattctcaggacatctactcaaatacacacaacacaaaataaataaagacaattctatttttaaaagtaaaaaggcgaggctggacagattgctcagtagttcagagtattggctacctttccagaggacccaggcttgggtctcaacaaattcatttgtcactctagttccagggaactctagttaaagattcctctgcctctgtgagcacacacaacgggtattgttattcaataaaatgaaatgggatatcaactcattgattaattgaaatccattgagaaacttaagtgcacatttgtaagtcacaggagctaagctagaaaattactgtaaaattctgactatggaggcagaacaactaccagtgatttccgaagattctaatgggaaagaaaagagaaaaagatagatttagagaatgggaagtgtcatagttagggttactattgctgcaagaaaacaccatgaccaaaaagcaagttggggagaaaatttttttttattctaattcctgttcatcaccaaaggaagtctggataggaaatcaaacaggacaggatcctggaggcagaagcaaatgcagaagccatagagagttgctgattactggcttgctctagtgatgaacaacaatgtgaagtgtaagctgaataaaccctttcctacccaacaggcctgttgctcattatatttcatcacagcaatagaaaccttaactaaaacaagtttgtaccaggagtggggtatttctgtgacagtcctgaccatcttctggggaggattgtaggaaaactttggaactttgggctagaggagatttagagtgttaggagttctgtgggatattattaggaccatggaagacaagaattttgagagtagtgcaaaaggtggaaaccaggcttgtgacatttcagaggaaaaattaaagactctatcagtgtcatttgctattttgatttaagattctttggttctcattagctgaggctgaagaatcagctatgattaacaagatgtcagaactactaaagcaaaacctttgtgtttctggaacaattgatgctggttggctggagctaagaaatcagcagttattaaaaaaagagagcagcatcactgaggtgaaatcttctgaaaagtgttttctgggaacacaaagaaattgcattccagagatagtcaaggttgtacctcatgctggcagccagacttgttaatgtatatgaatcaccaaggtggcactgatttgaagccatgaaggggtcatggagagcagctgaggcttggcactgtgagagactaggaaggaccattggtcggtggcagttgaaatgctagaactgaagggatcatgcaaagaagttgaggcttggcactgtgaaggaagcctataagaagttattagtgaaagtgcagcctagttgcaatggaaacccacagctgattagagatgccagtaccataggatgaccaccaagagcaacagcagcagtaaaatggagtcatctgaagagtagaagataagctatgtgtgctacagagggaagagctgaagaagtgatccaaaccctttgaaggatcccagaagatcatgtgttcgtatgtcagactgtcaaaggggtcattttattgactgggttcatgtatcatatgacacaagttagagtcatcagggaggaaggagctcagttgaaaaaatgcctccatgagattcagctttaaggcatttgctcaattagtgatcaatgagggatagtgcaacccattgtgggtggtatcatccctgggcccatggttctaggttctagaagaaagcaggctgagcaagctatgagcagcaaatcagtaagcagcacacctccatggcctgtgcatcagctcctgaactccagcctggcatgagttcccatcctgactttctccaatgatgaagtatggatctggaagtataagacaaataaacctttccttccctaccttgttctttgctcatggtgctttgttgcagcagtaaaaacactaactaaagacaggaagagacagagaaactatgacattctaacaatatgcgtatgtgggattaaatttatccatatccataggcagcaagaaggaaccttgatttaaaatatgaacacagtagtaaacatgtaggctcataaattgtaagaaacagaccagtgtgacaaagcatatctataatgcacatagtgtggagagagtatgataggtatgatagaaatatctgcagttcctagttgttttgtaattttaaaattactcattaaaaatagacacttctggagctgatcctgtgccacatcgatccatactcaaataccactgggagaaaaagagggtctcccaggagtgctgacaagcctgtaagcacaggtaaaaaccaccgcttctcctcagagagacttgcctggagacctcaggacacaggaacagaagaacagcctgggacaggatccttccaggttccatcagttcccagagttgatcgtaggccaaagggctccatacccaaatagaatcaagagagagctggtctcctaggagtcgtgacacacctgtgaacacaggtaagaccaccatttctcctcaaattcctggcccaagaggtacccatccagagccatcaagacataggaaccaagaaatagacagggacagggtccttctggtttctttctgcaccccagagctgaccctgtgccacagttttcatacccaaatttctcctggagagaactggtcttccaggagtactgagacacacgtttgcaggagggacaagccacaatcagagacagcaagaccaattaacatcagagataaccagatggtgagaggcaagtgcaagaaccttaccaacaaaaaccaaggctacttgaaatcatcagaaacagttctcccacaacagcaagctctggataacccaacacaccagaaaaagcaagactctggatagtaggtatagaagagagtgaagaatcccaacttaaagagccagtaaatatcttcaacaaaattatggaagaaaacttccctaatctaaagaaagagatgtccataaatatataagaagcctatagaactccaaatagattggaccaaaaaagaaatttctcccgtcacataatagtcaaaacaccaaatgcacaaagcaaagaaagaattttaaaagcagtagggaaaaaggtcaagtaacatggaaaggtagacctattctaattacaccatatttcttatcagagactatgaaagctagaagatcctgggtagatgttatacagaccctaagagaacataaataccagtgcaggtgactatacccagcaaaaccctcaattaccatagatggagaaaccaagatattccatgaaaaaaccaaatttgcacaatatctttccacaaatccagacctacaaaggataatagatggaaaagaccaacaaaaggagggaaagcacaccctagaaaaaacaaaaaagcaatctcctttcaacaaacccaaaagaagatagccacaaaacattaaaataacatcaaaaataacaggaagcaacaatcactgttccttactattttctaacatcaatggactcaatttgtcaaaaaaaagacataaaataacagactgggtacataaacaatatccagtactttgctacatacaggaaacacacctcaatgtcaaagacagacactacctcagagtaaagggctgggaaacaatttaccaaacaaatggtcccaagaaacaagctggagtatccattctaatatctaataaaatcactttcaaccaaaagttatcaaaaacaataaggcaggacacttcatactggtcaaaggaaaaatctaccaagatgaattctcaattctgaacatgtatgcttcaaattcaagggtacccacattcataaaagaaactttactgaagttcaaggcacacattgcacctcacacaataatagtgggagaattcaacactccactctcatcaatggacagatcatagaagcataaactaaaaagagtcacagtgaaactaacagaagttatgaaccaaacagatttaacagatatctatagaacatttcatcctaaaacaaacaaacaaaaatataccttcttatcagcacctcatggtaccttctccaaaattgaccatataattggtcacaaaataggcctcaacagatataagaaaattgaagcaatcccaagcatcctatcagatcacaatggactaagactggtcttcaatagcaacacaaacaacagaaagctcacatacacatggaagccctactcaatgataacttggtcaaaataaaaataaagaaattaaagactttagaatttaatgaaaatgaaggcagagcatacccaaactaatgggatacaatgaaagcaatgctaagaggaaaattcatagctctaagtgcctccaaaaagaaactgaagacagcatacactagcagcttaacagcacacctgaaatctctagaacaaaaatatgaaaatacacctaagaggagtagaccacaagaaataatcaaaatcatggatgaaatcaaccaagtagaaacaaaaagaactattcaaagaatcaacatagccaggaactggttctttgggggaaatcagcaagatagataaactccttagccagactaaccagagggcacagagacagtatccaagttaacaaaatcggaaatgaaaagggaaatataacagtagaacctgagaaaattcaaaatatcatcagatcttactacaaaagccatattcaacaaaactggaaaatctggatgaaatggacaattttctagacagttatcaaatacctaatttaaatcaggatcagataaaccatctaaactgttccataacccctaaagaaatagaatcagtcattaaaaaaaaaatcccaggtccaaatgggtttattgcagaattctatcagcccttcaaagaagacctaataccaatactcttcaaactattccacaaaatagaaacagaagcaacactactcaactcattcgatgaagtcacagttacactgagtattctcccttggagaaggaatggtttctatctaatcaggaacctgtcacaatttcctttcatagagaaattcataagagatttttctctatctctatcatgtttaatgttccaaatatatttttaaaactggttgagtgcatattacttttagcttcagaagatatcatgtatatttaagaggcattcaactattataaattatttttatgagttaaaaatctcaatactgagttgtatattttaaaataaattttattagtttaattaaaaaaagaaaaatgcacacttttaaaagaagagactttcctctcaacaaaacctgtgatgagtctggagtaatgaagacaacaagactattatatgatcttcagagagaaaactgaaacattgggcaaacctgtaaccaccctgatacagagcaatgatagccccttagttatatcgactttgtaacacggtataagatatttggaaatcaaaaattatgtgttttaagtatataatatgcttgtgtctgaaaaggaaactttcaaaatatacacatttttttctttaagaatttatttacttatttttattcactttacatcccagccacagctccacacacacacacagtcccacttagaaatcttttctcccattgcccacttctcttctcctcagagaaggggaagcccctccttgggtaccaccccaccctgggacatctagttccatcatgactaggtgcatcctcttccactgaggcctaaccaggcagcccaaatgtgtgtgtgtgtgtgtgtgtgtgtgtgtgtgtgtgtgtgtgtgtgtgtgtgtgtgtgaggggaggatccagtggtagagaacagatggagaaagccccactccacttgttatgaatcccacatgaagaccaagctgcacatttgctacaaatgtgtaggaggcctagttccaggccctgcatgctccctggttggtggtccagcctctatgagtccccaggggcccaggttagttgactctgtaggtctttggtgtccttgacccccctcaagcttggtcaattctatcccccactcttctacaaaaccccctgatatacacatattaaaattattatctgtattgaattgaattatggaaatttaaaagtactaaacaaaactgaaaagtattaccaaatcaaactaaacacaattaagatgttttattgattaaagtacaatatcaaaaaattcaagacatacagtgggagatatttgaacatatatatctgaaaaaagaaattacactcagaatatacaagatacttctcaaagcaacaagcaaagagaagccacacacatacacacaaacacacacacacaaacacacacacaaacacacacacataaacacacacacaaacacacacacataaacacacacacaaacacacacacaaataacatgaacaagcatctcaaaagacagtaacctgatggccactaaacagaaaatgtacaaaacttcatgaatgcagacaaatgctaatgaaatttaccctattaagtcacagcatgctcagtaatgttgtaaaaactgagaaagacaccaagtgctatcagagatgtggaacaactggaactcttacacttctatggtcttagtacaactacacatgaagactgcctaacatttggagaagtaatcgagcaatagaagagcagcttttcttggaatttagcctattttatttattgtctaagttgagctaaatagcattataaaaattcaatgagtatacaattatgactttttcctcctggatgtatggtgtatttcaaagcaaatataaaaagtgtataattaattattctatatatcatcatgtttaccttcttgaacaaaataaaatttcaaacttatgcaagaaagtggattcgtctactcaatagtcttataaaaacaaataattgccttttagtttgtttgaaaatgtatttagatgtattcttggcctctgaaaagattcatggatgacgtggtacacagctgcaagtccaacctggacctgaggtggtccttgttgtgagtgatcctggagagcctgaagcccaaccctaattccagaaaataggaaagacatccaagagattcgagaaaacgtaggaaatgtggcagaggccataaaggagaaaatcagagaggaacacagccttagctggactctgacagagggcagactctattttacatctgaatcccaaaacatggatttaatgaagaacatggtttcagacaccagtaccagcctttgagtctcaggggactacaggatctcgttgatttaagtcgagttgttccaactcaatatattgacctaatccagattatgaatgggagagatgtgaccatgccagcacttaaaagcaattatggggtccagccatttgaagaaggtactgatatttttcaagcaaaagttaatattgaggtgcagttggcttcaattgctacaattgaaaaaatggtggttttgttactacagccttttatgacccacgaagtatgaagatttggcacaaacctgttccactctttctgtggggacaacacattccaaaacaagtgatcctacctgaagctctggtgccctattatactgatggaaaaaattggggtacctgcccaaccctgccaagtttccctaagcaagacttgaactcaccatgaagtatggctatattctccctgatatcacgaaagatgaactcttcagaatgctcagcacttggaaggatccaaggcagagtttctttggtcttgctcctggccagatggtgaatatggcagataataaaattctaaaatgtacagatgagaatctcaagtatcacagctccttaactcccttccattaaagcagacttgttgtgagccagacacaggctgaaaattggcttcttctgggtcttaaagcctcggagttgataccagccgtcactgtggtcagatctcttgtcctttttctacctgatattaaatcacaagcagcatactagacagaggagctgagcctttgagggtgcatgtctcaaaaatccaaatggtggcagtctttagaaaggtgatcaaaaactgcttaaaaataaaaataaaatatattcttgcagcccaatttaattcaccaaaatcatatgtagaatttctggttgctaagaacggagctcacacttcaggccacttgtgtaaattaaaaggataccgaaacacatcaggatttaaatgtgctttgaaatggcaaaatgaaatgtaagaggaaaaaaggacacttggtggcgctgcaggctaagaatatgaagaatgagctctgcagactcccaggaagtcatttcattaacctgaaaagcagaatttcggaagctttggaggtggaagtaattgggtagggtttgtgtgatcatttgggaagaaggcgtctccctaattggatttactccaatatttgcacggaccctcacgagtggttgcaatccacttgaagcagcaccttctggactgaatctgcacaacggagacagcgctagcaaaaatgccagggcaaaggcaagtcttttttcttactatattgttgctgttttggaagtctgactctgaggcaattagatattccatgccagaagaaaaggagagtggctatttggtggcaaacgtggcaaaagatctggggctcagggttgaagaactggccactagaggagctcaaatccattacagaggaaacaaagagctcttgcagatggatgcagagactgggaatttgttcttaaaggaaaaactagaccgggaggcactgtgtggggcgacagaaccctgtgtgctgcacttccagatcatactggaaaaccctgtgcagttcttccaaactgaactgcagctcactgatataaacgaccactctccggagttctctgacacggaaatgcttctaacaattcctgagaacgcccagccagggactgtgtttcctctgaaggcagctcatgactctgacatagggagcaatgccgttcagaactacacagtcaatcccaacatccatttccatgtggttactctcagtcgctcagatggcaggaaatacccagagctggtgctggacagagccctggacagggaggagcagcctgagctcactttaaccctcactgctcttgatggcggatccccacccaggtcaggaaccaccgaagttcacattgaagtcgtggacatcaatgataacgccccccagtttatacagtcactctatgaggtgcaagttcctgagaacagtcccctcaatgccttagttgtcatggtctctgccacggacttagatgctgggatatatggcaatgtcgcctattctctgtttcaaggggatggattatctcaaccatttgtaatagacaaaatcacaggagaaatccgtctgaccaaagagctagatttcgaggtaagtcaccattataccatagaaattgcagccaccgatggagggggcctttcaggaaaatgcactgtggttatacaggtgttggatgtgaatgacaacgccccagagttggcgatcaggaagctcacagtccctgtcccagaaaattccgccgagactgtagttgctgtttttagtgtttctgattctgattcgggggacaacggaaggatagtgtgttctattcagaacaatatcccatttctcctgaaacccacatttgagaattactacaccttagtgaccgaggggccacttgatagagagagcagagctgagtacaacatcaccatcactgtctgggatttgggcacacccaggctcacaacccagcacaccataacagtgcaggtggccgacatcaacgacaacgcccctgccttcacccaaacatcctataccctgtttgtgcaagagaacaacagtcccgccctgcatataggcaccatcagtgccacagactcagattcaggctccaacgcccacatcacctactcgctgctgccgccccacgattcacagctggccctcgcctcgctagtctccatcaattcagacaatgggcagctgtttgcgctcagggcgatggactatgagatgcttcaggccttcgaactgcacgtggacgccacagatggaggctcacctgcgctcagcagccaggccctcgtgcgtgtggtagtgctagatgacaatgacaattcacctttcgtgctctacccgatgcagaatgcctcagcaccctgtacggagctattgcccagggcagcagagcctggatacctgatcaccaaagtggtggctgtggatcgcgactctggccagaatgcctggctgtcattccaactgctcaaggctacagagccagggctgttcagtgtgtgggcgcacaatggggaggtgcgcaccaccaggctgctgagtgagcgcgatgctccaaagcacaagctgctgctgctggtcaaggacaatggcgatcctccgcgctctgccagcgtcacgctgcacgtgctagtggtggatggcttctcgcagccttacctgcctctgccagaggtggcgcgggattccacgcaggacgattatgacgtgctcacgctgtacctagtcgttgccttggcatctgtatcttctctcttcctcttgtctgtgctgttgtttgtgggggtgagactgtgcaggagggccagggcagcctccctgggtgattactctgtacctgagggacactttcctagccacctggtggatgtcagtagagcagggaccctgtcccagagctatcaatatgaggtgtgtcttaatggaggtactggaacaaacgagttcaattttcttaaaccattgtttcctattcttccgacccaggctgctgctgaagaaagagaaaatgctgttgtgcgcaatagcgttgaattctattagaacatttgttttgaagtggtgacctcatttttccttaactctctctctttctgatgtacaattgtatagtgccatgagtcaactcttgagatatatgtgtaatttattctttgttttggatcagactattcagatgtgatcccactctagaaaatttggttctactgctttgtgttagtttatatttctattccataccagtgcatgctggattttttaaacaattataattttgcttttgtgggggacttatatttgctgtaactggaactgctgtcattgttacagatgacttgtttcgtttttgttatttcagacagggtcttacactatagccctggctgacctgaaatgactatgtacaaatagactttaaatttgtggcagtccatctgcttctgctgccctatgtccagattatgagcatgaacaagtagactcagctgtggtgagatgcctcaataaaaatcaaatactagttgtattttctatttattctagccactttatttctcgacagtctttttgatcctatgttaaaaatggaaactgtgggacagcattctctttattgttggtggaataaatataaataatgtttgcacatgacatctgaggaagcaatagaatcattatggacttctttgttttattttgctttgttttcgtttgtttttttcctgtcttgatccctgtgatcaaaaaaaaaaactgttaaaaccttaagtcaaattatagcatgacaaaaaaaaaccctaatgttcatctgaatgtggtttcacaaagtaagaatatgccattacatcagtgcaatgggaaaaaataaatattactaacattccaagtgccactcaaatgaccctttacaaccactattgtccaaagtatagcaagcatgctgacttccaatcctatagtcctgcctcttttgagtttatgtaaatttcttgtaggttaccagttgcttctttcattctatattgtgtttatgaaatatatgcatagtattgctttaatgtttgttgttttataatttttatcataaattattattttaattgtgtatgccacactttattactaaattactcatttgtcttagtttaaggtttggttgttataatattgtgaacattcttacatatatggtttggttggatacatatttgcatttgtgaagaacattcacttcttgggggtagagttgtatgagtaaactttcaataagtatttctgactagatttcaatattggttgcaaacaacttacaagaagccatatctggatataaaactttgttcacattcttgcccaaaccttgtctaattggcaagcactttgtgtgtgtgtgtgtgtgtgtgtgtgtacagtgtgtgcatgtgtggaccaaggcatttgcatggaggtcagaagacaccttggaatagccttccaccttatttcagacagggtccctttggtgtttttctgttgtaggcacctagagcttctagagattctcttgtgtctgcctcccatctccctagaggagaactaggatttgatccagggtcttcatgcgtgttcagacaagtgcttttacccatcaaaacaccttcccatctcaaaagtaccttcaaacaattttaaaatctctttttaatcaacttgtttattactaagaaatacattttaaaccactatcagctgaattgctagcatcccagattttttgtgtgtaaagtgtaatagcaagatactatctttctcatttaagtgccaatgttcttaatggacttttctttgtctagattgagttcagcacatgctgtaatgctgataaaatctgttttaactttgggaatactctataagccatatttgaagacacctggtaccattgtagccacagagtgaataaagtaacttgggagacagtatgacattaacctagaatcagagctgagaatacccattgttagtccacccctcactgtgatggaatgtgaaagaaaacaagggaggaagcatttattttggctcaaggtttcagcccatcactgaaggaagagcacctgtcttagagctgtattgctgtgaacagacaccatgaccaaagcaactcttataaggacagtatttagttggggctgacttaaaagttcagagattcagtccattatcatcaaggtaggaacatggcagcatccaggcaggcatggtgcaggaggagctgagaattctacatcttcatctgaaagctactagcagaatactgacttccaagaagctaggatgaggattttatagcccacacccacagtgacacaccgactccaaggcaacacctactccaacaagaccacacctactccaacagggccacaccttctaacagtgccactccgtgggttgagcatatacaaaccatcacattatatacaaaccatcacagcatccattgaggtgaccagaacctagaggacagattgcttacctggtgttctttctctgttttcttctctgattctgactctggtctaggggatggcgctgcccacatgcagtgtgtgtttcttccctcagttctctctagagaacccatcacagaccctgcaggagataagactgaccaatcatggctgtactgaaatcaaattgacaacaatgactaaccatgaccccattcaaaaggaacgtttagaaatgatctagcaatgaccaaacccatccacaatctttgacggttggttttacttcattagttccatttgttagtcacatgctcaagaaatgtgcatcctcagaaatggcttttctagtaaaccctggaggatggtgatattgatattctttttattctattgaatatacacatgtgatctctagctataagatgatttcaaccataagattttaaatttgttttactaagagttaaaatatttttgatatgttctaatttctcaccttccattttcttggctgttatgtgaagtgaagtttgcttgacttcaatgaatgtatctttaaataaatataaaatccatcagaaaccagtcatatttattatatattatgttcttgtatggttacttacccaccttttaaatgatacttaaagatgcttgaatttattagaaaagagcaagacagtaaaagaatataaccatgatattcagtcattaaattccatggtgtgttcaaatgtaatccctttcacattttctgcatttctatttgttggggttttttgagatgcagtctttatttagcctaagcttgccttaaacttgctgcccttctgtcttagactcccaagtcctgggattatagccatgcaccactactgtactccttgaatgtcattttctgcatcatgccataggtagattacaataggataatatatttgatcaatcaacatgaggatgttttgtctagtgaaaagttataataaaacccctgaacctctcaaaacaatgaccaattctactcacctagaaatgaaattaaatcttaaagttcttatgacaaatatctatttctcctattcctattttaaattaatcattttggttagatattgctatcatatataccttttggctgcagttttcctctcagtggcctaatgactaccattattgtcctcatgtgaccttgtcacaaagtaagtctgtgctcacaccattcatgagtcatgtgtggtagagaagttaaggttcgggccaatatttatgtttctaaccagcgttcacattttcaatcatttgttgatgtgtttattgggacaattaatcagtgtacatcttaaactcatgattttatagaactcatcagagatcagttgtactgttaaagaaccatagttgtttatgagacgttgacacggccagcgagaatgatttgtaaatacataaaagactgtggagtggactccccttagatcagcaggcagttggattcaagatatagagtgggcttgaaaaaccaacctaaaaacaaaatacaagtatgtacacacaaacatgtctcctaagaaacccgtcacacgctgagtttggaaacgctgactcaaaagtccttatgatgcccagacttggataaaagtttttataatgctccgtgttgatccaaagatttctcatgaagttattgatttgaacgcatggtggcggtgtaggctaagagaatgagtaagaaccctttagcgtcctcagactccggttcacctagatgctgaagcaaaaatacggaaccatttgctgctgcagctaagcattccggagaagaggagtcaccgggaacctgtacgatcaattccacaattccacaacaaaggttttcgggaaggccaaagttacctcggtgatgaagagctggaagggatttttcctctggattcagacaatagagatgtcacacgcaaaaatgtggtgcaagacaaggcaagtgatggttttgattacatcgatgcttttgtgggaggtgggttcaggatcaattcagtatgccatgctggaggagacagaaagtggcacgtttgtggccaacctgactaagcacttggggctaagggtgggagaactggctgctcgggatgctagagtggttttcaaggggaacagacagtatttgcagcttgaccctcagacccaggatttgatgctaaatgaaaacctggaccgggaggaactgtgtggctccacagaaccttgtgtgctgtctttccgggtgttactaaaaaatcctttgcagttttatcaagctgaactgagagttatagatataaatgaccacgccccagagtttcctgccagagaaatgctccttaaaatatcagaaatagctccacctggaaagatattccctttgaaaatggcacaggacttagacactggcagccacagcattcagagctacactgtcagtgataaccctcacttccacgtgctcactcgcaatcgcagcgatggcaagaagttccctgagctagtgttggacaaggctttggaccgtgagaagcaagaccagctcagactaaagctcactgcggtggatggtgggtctccgcccaggtcagggaccacagaaattcaaatattagtcttagatataaatgacaacacgccggaatttgctcaggagctctatgaggtccaagttcctgagaacagtcccattggctcactgcttattacagtctcagcaagagatttagatgcaggaccctttggggaggtgtcttatggactgtctcaagatgatgatgttaacgagccttttgaaataaacacaaagacaggagaaattcgactgaaaagcacgttggattttgaagcattccagtcttaccatgtggatgtcgaggccctagatggtggcgggctaacaggaaaatgctccttagtcgtccaagtattggacgtgaatgataacgctccagaagtgatcctatcctcactcaacagccccatccctgaaaatttgccaggtatcatagtggcagtattcagtgtttcagatgcggactctggaaataaccagcaggttatgtgttccatagatgacaatcttccgtttcttctaagaccatctatggagaatttctatactctggaaacagatggggcactagacagagagagcagatctgaatacaatattaccatcacagtcaccgacatgggcacacccaggctcacaacccagcacaacataacagtgcaggtgtctgacatcaacgacaatgcccctgccttcacccaaacctcctacaccttgttcgtccacgagaacaacagccccgccctgcacataggcaccatcagtgccacagactcagattcaggctccaatgcccacatcacctactcactgctgctgcctcaggacaagcagctgaccctcacctcgctggtctccatcaacgcagacaacgggcaactgtttgcgctcagggctctggactatgaggccctgcaggccttcgagttccgcgtagacgccacagaccaaggttctccagcgctcagcagccaagtgctggtgcgcgtggtggtgctggacgacaatgacaatgcgcccttcgtgctctacccgatgcagaatgcctctgcaccctgcacagagctgcttcccagggctgcagagcccggatacctggtcaccaaggtggtggcagttgaccgcgactctggccagaatgcctggctgtcattccaactgttcaaggccacggagcctggactgtttagtgtgtgggcgcacaatggcgaagtgcgcaccaccaggctgctgagcgagcgcgatgtgcccaagcacaggctgctgctgctggtcaaggacaatggagaacctccacgctctgccagtgtcactcttcatgtgctgctggtggatggcttctctcagccctacctgcctctgccagaggtggcgcaggactccacagaggatgctgaagatgcgctcacgttatacctggttattgccttagcatctgtatcttcgctcttcctcttgtctgtggtgctgtttgtgggggtgaggctgtgcaagaagttcagagcggcctctctcggtggctactctgtgcctgagggacactttcctggccatctggtggatgtcagcggcgctgggactctttcccagagctaccagtatgaggtgtgtctgagaggagacactgggactggtgagttcaaattgcgaaaggcaattaatccccactttccttctgtgccctctgagaggaacacagaggaaagtcctactcttcggaatagcttcttattcatctaaatactttagtaagctagtaaattctgtttaagcttagaaatatcttttaacctatatctgcacgctatcgatgtgcattgacagaagtttatgctcttactttttatgatagcgcctgggaatggaatccagtgtctcatgcatgttaggcaaactaaaccactgagttaaatcacttttcttttcctttcttttcttttctttcctttccttttcttttctctgcttttctttcttttctgtgttttggaaacagggatgtttctttttcttttttctttctcttgcttatttatttacattccgaattttgcccccttcctggttcaccctccaagagttcttcactccatcccccttctcttttgcctctgagaggatgctcccccaccctcccaccccctcattcacccactcacctccacctcacatccctctttccttggggcatcctggctgccctggaactcactctgtagaccaggctggccttgaactcatatcgatcccctgcctctgtcttctgggtggtggaagtaaaagcatatgcccaccacaggtttcactgtgtagcctgagatggtctgaatctcactagattgacctggctgtcttggaactcagagagacccacctgcatctgtcaccttagtactgtgactaaaggcttttgccgtcacacttggcctgtctgtaccattgctattattcttgagattttactttttagaaagacagtttctggagattccactagtttctctactatgcttcatagtttgttttttaattagtggaactaacctgtatttgacaagttaaataaaaatattttaatagtatatgaactcaaacaatcttttaagtatactatcatgcaaagtctttgagattccgttttacacaagttattaaattaattttactattagattgaagaatttttaaatgtgaacacttgatattactgaattttgtaaatttagtctcattttgtggtaactggttatcaggtacatcttttaatataaatgtaaggaactctaaatgctaagacatataccttacttatgtatgcacaattaggaatgtctctgtgcattctaataatcaacacatatttcttaaatgtagattttactgaactgtcaattcattaaattatagtttgtgaacattgtgtaagaagagtatgatctttgagcatcaagatatttacaaaagttgaataaatctttgcttaatattactaactgtccagcagtccttttttagacaaaaattctaaagaaatgctaacattctctctacaactatgtgcctttgccaatgaatgaagtttttatttttatcttaattacaagtatatgaaactttaaacattatcacttactaaggttatcttctttccttccatatagaaaatatctttcctctcattctaaaatttattgctgagaaagaaatccagtaaagcacattttatctttgtgtgtgtgtgtgtgtgtgtgtgtgtgtaacagtttgggagttcaaagtttttgtgttcatgtatataaacttaaatcgtattttccaaacttcaccctctgctttctcaagtattcgtattttctcctctgatgtttatgaacatcatttactaactagaaagccatttctattcacagtcttcttttgtaggttattgttgccatattgtataaaaatactcttttcaaatgtctctcatagaaaagtaaattgcattaagatactctgtggattttgttttacttttaaccttaatcaaagtggactgggaagcctttactctttggaattctgggattcttgtccctcaaatggcacttttttcttgggggcatttgcttctgtcactccaactatgcagctctgtttggagcttcagtgtttttcaattatgcaatttccacagcccaaaagttgtgcagtgcctggtcccctacctaatagcgtacatgaagaaacccttcctgagacaggatccattttccaacatcaacctcattatcttctttgtatttgagaaacggcagttgaactctgagccagaacttataaagcgagtgaccaccagcaatcaaatgtattggtcatcacatacaatgaaggatagtttcaaagaatgtatacccccaaagactgaaacaaacaaacaatagcaaaagatcacccttcagttgtccttcagtagcttcaggcacatggccatttggaagtttaaaactgtattttcaaaaaataatatatttatgtaaaacaaaaggaatttgtaacttttacaaattttactgagaacaagaaattttgtttgttcctttatggtgttacggtcaaaatctaaatgattacctatacagataaataagttttaaatgaacgactgtctttgcagagacagagctttgtgtactgagtttgttccttcatgagaaaggtttgtagttctctcacacagcttaactacctcaaggctgccatacgagacttaggtgaaaggaaagacgcaaatagaacaaacactttgacctaaaaagtgggccacacattttagcctttacagtgtactttgaaacaaaaaatatctgaagttgtaaaacagaacgcttggtggcgctgcaggctaagaaaactgaatcttggcgaatttgtgactgtaaaatcagagccatttcttgctgctgagaagggaagcttttcacagctctgccgatcgatcctttcagagaggtggataagctgcgtccagcaacattaaaaagagaagaatcttaaatttatgtagccaggattcctgagctgttcacaaagcaattcttggatgattatctgctgcatcttttggagcagaggaacgatggagacatcactccacaaggcaccacagaaaaggcaagtgaccgccattatctttctgttactgctgtgggaggcaggtagtgcaaccatcacgtattccgttctagaggagacagacaggggctctttggtggggaacctagcaaaagatttggggttgagtttaagggagttgattaccaggggcgcccagattctttccaaagggaacaaacagctcctgcagctggagcagaagagtggaaatttgctcctgaaagaaaaattggatcgagaggagttatgcgggagcaccaatccgtgtatcctacatttccaggtgttactaaaaagtccagtgcaatttattcaaggggaaatacagcttcaagatgtaaatgatcatgccccagaattcatggaagatgaaattctccttaaaattttggaaagcagccttccaggtgccgtgtttccattgaaaatagctcaagatttggatgtggggagcaacacggttcaaaactatacaatcagcaccaacgcccatttccaccttctcacccgcaatcacagcgacggcaggaaatatccagagctcgtgctagacaaagcactggaccgggaggaacaggcacagattagattaacactcacggctatggacagtgggtcacctcccaagactgggactacccaggttgtcattgtggtcctggacattaatgacaatgcccctgaatttgcccaagggctctatgaggtgcaagttcaagagaacagtcctgtgggctcccttgtcctcactgtatccgcaagagatttagatgctgggacacacggagagctctcctattcgctttttcaatcatcaaatcaagttctacaggcttttgaagtaaatacagacaccggagaaattagagtaagaaaactgttggactttgaggaaattcagtcttaccgcatggaaatcgaggcctctgatgggggaggcctttcaggaaaatgcacagtagtaatacatgtgatggatgtaaatgacaacgctcctgaactcaccatgtcagtacttatcagcgaaattccagaaaactcccctgaaactatagtcgcgatttttggaatttcagatccagactctggagacaatggaaaaatggtgtgctccgtccaagaccgtcttcctttcctcttgaaacctaatgaagaaaacttctacacgttggtaactgaaagagcactggacagagagagcagagctgagtacaacatcaccattacggtctcagacatgggcacacccaggctcacaacccagcacaccataacagtgcaggtgtctgacatcaatgacaacgcccctgccttcactcacacctcctacaccatgtttgtccgagaaaacaacagccctgcattgcacataggcaccatcagcgccacagactcagactcaggctccaatgcccacatcacctactcgctgctgcctccccatgacccacaactggccctcaactcgctcatctccatcaacgcagacaatgggcagctgtttgcgctcagggcgctggactatgaggccctgcaggcctttgagttccatgtgggcgccacagatggaggctctcccgcgctcagcagccaggcgctggtgcgcgtggtggtgctggacgacaatgacaatgcgcccttcgtgctctacccgatgcagaacgcttctgcgccttgcactgagctgctgcccagggcagcggagcccggatatctggtcaccaaggtggtggctgtggaccgcgactctggacagaatgcctggctgtcattccaactgctcaagaccacggagcctggactgttcagtgtgtgggcgcacaatggcgaggtgcgcaccaccaggctgctgagcgagcgcgatgtgcccaagcacaggctgctcctgctggtcaaggacaatggagaacctccacactctgccagtgtcacactgcatgtattgctggtcgatggtttctctcagccctaccttcctctgccagaggtggcgcgcgaccctgcacaagaagatgtactaacactctacctggtcattgccttggcctctgtgtcttctctcttcctggtgtctgtgctgctgtttgtgggagtaagactgtgcaggaaggctggggagacttctctgggtggctgctctgtgcctgagggacactttcctggccacctggtggatgttagcggaactgggaccctgtcccagagctaccagtatgaggtgtgtctgacgggaggtactggaacaaatgagtttaaatttcttaaaccagtacttcccaactttttgaatgaaggaggttacagaaacacggaggagaattccaattttagggattctttggggtttagctaaaagtcacatttgactcgtgtgatgataataacacgatattagtgatataatttcacaaccattcactcgtggaaagaggtctgcactagcatgatactggtagtcatatttgtagctgattcacattgtcgaatattccttgcattttttgctaactatctttccctcaagcacacaatatagctgcaaaatgttctttcttggtgggattcgtcttcaacacttaaaaaaaaaaggtttaaaagttaagagatattttcaggctcctggtttctgagcatgtgcattgatttcttttaatcacagaactcctgtctcgaaagttcttgttattactaggatgaatttaatgctattgtaaatgatggctttcagttttaaaaataattttcaatcaggcaagcattcttttgtgaacttctaaatcctatgattctgttgcctaggtccaagagccctattttctttcttcaaatgaactgttattcgatcaggattatgtttctaaattaagtatttctttcaaaatatataaaagttaattaaagtatttttaacattccgaaaaactcatctgttatatcaaaaatggtggacttattaatacacttgtgactagtttttcagaaatggctttggtatgtaaatagtgattctaactcttttaacatgattgagcaatcatcaatctacatgattaatacatacacagtaaacacagagacacattagtgtgctttcacaagaaatttgtcataagtcaatattactctaaaatacatctactggagcttgaggtgtagctaaatggaaaaccatgtgttcagcacgcatgatgccctggatacaacactcagaaccaaacagaaaaaataagctcttcatgtgaaaataaataagattttaattaacaaatgagatcagttctcaaaaagtgaattataataaacttaaaacatctaagtaaaactaccaggggctggaaagatgactttgtgctaaagaggaaatattcctctaaggaccccagcttagttctcagcaccaatgtctggtggctcacaaatagactctaattcgagcttcagggagatccattgccctcttccagtgtccatgtgtacccacacacataaaactgatatcaatataaattaaatcataatttatatagttggtgatactcagtagccatttggtcttcggcttttctttgaagaaaaagttctaaactgactcttattattggcctgttaattttcttcaagaatgtatctaggttataagattagttgccagatgcctgctcatcatattatttcactattctttgtgttttgtggtgttggttgcaatgtctcccttttaatctctgatttttttttaaatttttagtctatcatagtgtttgtcagggttttttttgtttgtttgttttgtttttgtttttgttttttttttaaagaacaggctctcgagaggttatgttcctcttttctggattattcagtctcttcctttcttgtttctgtcctactagtttatttttgtctattaattttgaacttggttcattcttgttctgttggtcctttgaaacacagggtcagattgtttatttcggagcttgctttctttaatggtttcattggtgtttacagatttccctcttggtactgcttttgctgtatctcattggtctcagtgtggtgtgtggccactttcctttgcttgacaggatttttttcttgattttactgttggattaatttattgcttaaagtaggttgcttagtgtttaatttttctacttctttctttttaagatgcaatctcattgtattccctgaggtgttctgaactcacttattggccagggtggcattgaacatgccgtctcatctcagcctaccaagtgctggaattccatacttgtgtcataaaagcttgtgacacaaagcttagtctttcttgcctttgttctaattactatattttgtttttatctttaccagaatgtagtagatcttctccatctacttttttatttttctgattaaaatttcagaaattttaattttttgttttctgaatgtttcttttccttgcatggtttaagattttaaaattttgtgagatttaattaatatgtgattattctctagtgaatatatatatatgtacgtatgtatattcactatcaaaattgtgactgtttccatcatccctaaaatgaacttggtgtccattaacaggcaacacacacacacacacacacacacacacacacacacaccactgaagtccatggtaaaatactaataagttttctatctcttttaattttttttattctgtacatttcatatgcatgaaagcgtgtatgtagcattgtgtgtctgaattctttcgtgtgacataacattttcaaggtccattgtattaagatatatcagtactttattcattttatgactcatattctattgcatggatgtaccatacttttctcattagatataaaaactttgcatattataaataatgatgctataagttttgtttgcacatatgttttcaattcttttggcatacgcctatgattagaattactgagttacaaagactatatcttttgaattgttgtcaaattatttttcaaaaagaatgccattttacattcctaccaacaatgtatagaaaaatcatttttccatatccagtttttccttaaaattgttttcatcctatctatgtgaagcaacatattactgtggtttgatttgcagttccaaaatgatctctagtgttgagcgtatttccatgagtttattggctatttgagtatattgtatgaacacattcttatttgattgattgtaattaaggtatacagcctaaactacagccttataatttataatttatgaacatttataaacatttctctcatttcgtttatcattttactttgttgataatgtcctttgaagaaaagaaatattttggtaaacccaatagtcttaattatttgtacattaagtgttatatcttagaaatcactgcctggtgaaattatgtagattatactgttttcccaaaagtcttcttaattttagcccttacgtttgaagtctatattttataacaccattttatagatttaggccctaagcatatattgttaatttctctacagcgttctattattttattacagaaattgagaattttctgatacttctgaaagtattagttttaagtttaaaaagtacttctaaccacatctttttcatttgagttatattttctttatttttttaatatttccatcatgttacagactctccttattacatcttttggatgactgtttttattggtttttagtgaattaaaatgcccacaagatatcctgtgtttggttggggctagttgagtggtgaaccttaacttacagggagacaatttgttttaggaccaaaactcagcttctgtaagttttctcatgggcccatgtaattctctaaagaagaatttaattacaaaatcagtggacaagatggaaggaattaaaaacttggcacctggcattttgaacttcatggtatagaggaagtactgataatcagtgtgtagaattttcaaacttctccacactaaagtctaattcctatccttacttttgctggtatttctcagtacctcaatccagagctctgccattttctgatgctcagagggaaaaaatgtatattgctttatctgatggggaagggaaagctacttccttatagagattttcatattctctctctctctctctctctctctctctctctctctctctctctctctctgtgtgtgtgtgtgtgtgtgtgtgtgtgtgtgtgtgtccctctctccctccctccctcctcacaaaccttcaatttgagtcattactttacctgaatttgattttcttattattaatatccttcttggtagagctgaaaataatgaaatttgtcagttaccacttgtttgtatcctttgaacattccaaaaacttagtggttttctctgaagtctactctttttattattacaagtttgtttattttaacacacagtgttatttaaacaaagattaaggagaaaatcaagatgaactgataaactcgaaatacattcccagtttccccatactagagccatccatattatttcatatcttgcttcattctgacagaaatagactttcaaggtgaactgttttctgagttctcacatgactgagaagcgtagtttagctgggtataaaattcttcagtcaactttcttaaagtgggtgctaagaaataaaagttcagtcctctgaaaaaaacaagtattcttaaccactaagttatctgtccagcctctctcaaagagttttaatgcagacattttattgagaacactggaagagcataaatgggctgtaactgtagtaccacttgtatgtcatataaatagggcaagagacatctttctatgtgcagataataagatttctttttatgtagttccaagatatataatttgtgctatgggaaggggagcagttcatattgtttgatatatactctaagaatttagtatgagctacagtgaatgtagcttccagttctaatcagagtatcaacataaggctctaggatacatagaactttatattgccattacaatctggtatggcctggtctgagtgccttcatcattcccataagagtctggagatttgtaggaaggcagaacagcacaaaatgcgtgttaaagggcctttgagagatgggtaaagccaactgtcaccaagcctaagaacctgagtctgatctgcaggtcatacaaataataaggacacagactccttgaatgttgtctctgacaaccactcaagtacagtggcattatgagtgagcacacacaaaccatagcccaagcaacctatcaacctcactacttgcccagagtaaggaaagatgaaatctggcctgagtttctggttaactttatttcttgggagaatagggtgaaggagaggatagatggaaagaaaagaaggaagaagagaagaggttaaaaagagtaatgatgaccagtttcaaagaaggacaactggtacatcttcttacatgccagaagtgagtggaaattaaatcttgcctgaacagctaatcacttttacccctgaggaggagacagagaggaaggaaaaaaacctcctctggtatttttgacatcaaatattatattatattataattatattttctccattcatccatagttggctaaatgttagtgttaagtagtttatttcaattaatactcatgtatactgatgtaatgttcatgaatttttttctatttgcagaattgttacctatgttcttgaaaagtataaattaggtgaattattgagaccaaattgctttccctcacaacattcctcagttacattatgtgtaaaatgttcctcagaggcctggagcctctgtttttgacttgtagataactttctctttttccatgatgaagacaaaaccgaggcagtaccttgccactcagtatatcccccacgactgaatatcttcctgttagagttagtgttcattgtcattttggcaagatctagaccagatgcagaccttctggtacaccttacacctatatatgtgttatacaggttaagtaagcttttgaacactcctttttagtttggtttttcaagatagggtttctctgtatagcattggctctcctggaactttcagaatctgcctgcctctgccacttaagtgttgggattaaaagtgtgcatcaccaccactgggatgggagattatcatgattgcattaattgaactaaaaaggtctgcccactgtgggtatcataattttgtgtctgggatcctggattgaatacatggggaaatagagctgaactgcagcatttttttcattcctgtctgcttcctaactgtggatgtcatatgaccagcaacttcaaactcctgccagcctggccaccccacctggatggacaacagcctggaaccgtgagactgaataaatgcgttctcccctaaagttgcttttgtcaagatttttttttttatcacagcaaccaaaaagtaactaagaggcttcattctctgtttgaagattattgcctttccttttacaatttgcattcattcattcttgtggctggcacctcattaactggccttctctgcaacctcattcatttatttttatgagtatgtgttatctgtatgtgcacagcatgtgtgcagagctcatgaagacaagaaggtgcctcaagttccctgaaattggaattacatgtgtttgtgagtcatctaatggatttgttcagaactgaatccgagtcctcttcaaaagaacaaaagctcttaaccactgacccatcatcccagccacctaggatcgctaacattattgttgttttggagctgagtatatcctttcaacatgacccatgcagatatttttcaagtatgccatttatatggtaagtataattgtttggccattcgcctgatatttccattgactaatgttagtgtgttagggggagagctattttatcttcctataatttgtgctgtctttgtttctttgtatggcgtgtgtggtcgcctaccttttatcagatggcatatctacaaacatttttcatgttctatccttcaaactggattttcacttgttttagctaggatagtgaaaatggtgtggatagggattcaccaccagtagttttaccacaaagctcatgactggaggattcttacaactcacctatacatattcaaacatgtacatacaaggacctatctataactacaatttttcttttattcttgtctttttatgatcttgacaaatcaaatttcccttctgtacccttctatagagctcttcctttgatgagcttagactaatatgcactctacatataaattagtcaatactggtgccttaattacattttacaacttattttgtgtacataccaaagtttaaacacatgttttacatatgtgtgctgatggcacaggacaacttgaaggagtcatctctctgtatctatgatgtggttcctgggatttgaactcaagttgtcagctcttgtgacaggcacctttgatgggtaaaccattttgtcaaacctatgtttagtttccatatcttagtaaacttaaaagttacagtataagtttagagtaatagcatcatttgggagtcagatgtaagaagatcaagagtccaaggtcattctgagctactcagcaaatctgagatcagtctgggctataaaagatatcgtctccaaaaaaccctaataagatgactcacaaacacgtagcttttcatgaaatattcacttactatttataatttgatatttgctttgttaacactgcaataatataacctggaatatgtgagccaattttctttttttaaatatataatcaatcttggtagcatatactgataatccatacacgtgggaggctgagactagggtcaccaaaagaactggacaaccatgtgtaaaaaaaattatcctgaactgatttctaatgctccctggtgtcctaggtctcaatgtgtggtatggtaaaagaccaagaaagtgatactgcagctcttagcaagaatattctgtacaatatcctattctgcatcctcagttcatacccagacactggtggctacacagagaaacactgacttgctcacatacttcattcacacctttctaaacttgtgaatcaacaacagcaatggtgaagaaatgactttgcctttcttatgaagattatgtgaaggaatgacattcttcaacataatttacatctacaacaataattcaaaggtgtttaggaagttttaagctgcctcttcctatggaaatacttctacagagcacactatgaccttagacaaaacatagaataggatgcattatttggtaccttttggactaagctttcattaaactaagaatctttttggatatcaaatacatcaataatatagagatacagtcatatgctcaaataacaaccagtctgaactgggtgacattcaactctatatacaactactgggtagttaaagtaaggcaagggtcagctctgagtagatatgacaaaactgataatctgaccaaaatatgtaacgttcacatctcatgtggacatgtgagctataaattatacttcccaacttttcctacagttgattgttgtttaataattatgttatgggtatggcatattcagggatgttttacttttaaagaaagggcagacttgcttccatttagttactgctatgagcagagatgtaggaaattaggcagctatcctgttctaaaaaaaagatgaaagctgtgtcctgaagatgtcaaatcaataacagaatgatgatagattctaaagatatctgagaacaattttcagcctttgtttttatgaaagaaaaacaaaatgtgtatattatgcttttaaaatgatgcaatatttatttttccaagaatttgctatatgatttttttctggagagatgggaactaatttctattcactccagaaagggattcaatgcctgaccagagaaacaattctatcaaactctacttagaagaatcaatgagtatattggctccagaagttcagttgatgactcccaaaagataaatcccacaaattccctactcaacttgcaagcagtttgacccaagaggattttctatctccttgcaattatcttctgcttatatgttcttggggagggacactgggaaacttgtaacttcctgaacaagtcttaaaactttcatgaccttcctgaatcttataagtcaaatatttcaacgtggaaaaacaactacacagcagtgccagtcaatagacaaacagataaagaaaacatgttatgtatgcatatattagtattagttagccacaaaaaatggaatggtgctgcctacagaaaagtggaattagagatcaccagagtagaaatacagtggttaaccaaaccatattttaaaaagaaaagtgttacatgctttgtcacctaccaagactcttgggtatatttttctttaaaggcatacaagcataagaggaaaggtactcattacttttctcattgttacaacaaactgacaaaggcaacttaaacaatggtttggttcagtatgagggtacagtccatcatggtagagaagttacagcaatcagatcatgaaggtcacagtcacagagcagagagagatggatgcttctgctcacctttctcattttcattcaatctgggaccacagcccaggaaacaatgacacccacatttagggtgtgtcttcccactacaataattcaatctacatactccatcacagacaaattatgggtccttggatgactgctgtgaggagaaccatatggaattgtgtagggcatgaataggagaaccaactataataagtcattgaactttgaaaaagttaagtgatactgatttgatactgaaatataatacaaacatagccttcttcagtgaaaatctccactcttctagtcctacccaaccctttacatttttcattctgcatgtttttagggatagaaagcaggggaagttcgtggcatggtagctcaagcctctcattcaagcactcaaaagtggaggcaggaggagtcatggctacatacaaaaccaatttgacctcattctcaagattctagctccaaaaaagaaataagttaaacataataataaaataaaaagtatctatcaatgaatgaaaagtacataagaaggaaagatagacagaaaatgaaaataaataggtcaagagccactcccacacactggaatgtttttcaccttacaatgattgtaaaagcaattgctatcaacctgttcagggttatcactctgcttgttagtctttaaagttgatttaagaaaaacccttgggctaggaatgtggctcagtggtagcaaacatggatgaaggcctgaaatcaaacccttgcactaggaaaaataaaattttcaaataaaaagaagaagaggaggaggaagaagaagaagaagaagaaggaggaggaggaggaggaggaggaggaggagagggagggggagggggaggaggaggaggaggaggagaaggagaaggagaaggagaagaaggagaagaagaagaagaagaagaagaagaagaagaagaagaagaagaagaagaagaagaagaagaagaagaagaagaagaagaagaagaagaagaagaggaggaggaggaggaggaggaggaggaggaggaggaggaggaggaggaggaggaggaggaggaggaggaggaggaggaggaagaaaagtcaaaacaaaccaatgcaaaaggactcttgggaaaagctagaccatttgcaaagagaaacatttgggagtgaaacttattattatcagagggtggaaaagtcatcgtgtctaatcaataagaatggaagagctcttggaaaatatgaatccaataaatgaaaatctcattagagggccttaacagtaaagttaagaagatacttcaaaaaaagccaggtgtgctggcatagaccttcattcccagcacttaggaaacagatgcctgtggatctctagaactcaaggtcagtcctggtctacatagggagctctaggctatacagaactacatagcaagactctctttcaagaaaaccaaaaatattcctggggaaatattgaaaaataattttaattggcagtaagaaaaataaaatagggaaatgagagaagccatactgaagtgcagcaatggaatcaaaagaactctgcaaaagagagaagagaagaatcagtgaaaaagaggactcagtagagtaattgaaactgtacaacatgaaggaaactggtttcctaggttaaatggcccatcaattatctggtacaatgaatgaaatataaactcaggccaagaatttgagactgtttaatttataaatgattgggataatgataaaatcctacgacagtaagtaaaatatatgttgtatattgataatgagaaaacaattaggttcagatttcatagcaactagagttattcaaatagctcattgataaaacttaattatgaaggaaaattattttcaacctaaaaatattagttacaggtccaatgaagttcaacaatagaataaatatattttaacacatttaggatctcgacaagggcatgcagacatggtggtacatgtctttaatcctagcactctctggaggcagagacaggtggtactatgtgagtccaaggctagcctgggctaaacagtgagtctttgtgtcaaaacaacaaacaaaaaagagcaacaaagagatggctgagttagcattatgcctgctgggcaagcaagaggacctgagttaagagctccagttctcaccaaagcaacaagtagtaagcctctcactggtaaaccctgcctcaaaataattacaggaagtggctaaagagattcattcaacagttaagagcactaactcttcttgataagatgcaggtttagttcacagctcccacatagtggttcagaaacacttgtaactatagtaccagaagatctgtcttcctcttatgatcacccttacaggctcctgcatatacagacactcagcacatattcatacacacataaaataaatctttaaaaagtaaggtggacacaaaaagatggcctacaaaatcaactaagcagggctcataggaactcacaaagactgaaccaatgatatggggcatgcatgaatttaacctaggtcttctgcttatattctatggttgtggtagcttggtgtttttgtagagttactactaacaatggcatcgaggactgtctctgactcctttgcctggttttgggactgtttccctcctactgctgcctcatccaaccttaatataaggggatgtgcctggtcttgcttgatatatcatgtttggttgatatcccttggagtcttcctgctcctttatgaagagaaaggagcagtgaagctgggagataggagatatgaggggaagggactgggaggaaaggagaaaggggaaactggggtagggttgggatgtaacatatgggagaagaataaataaacaagaaaaccagcacctgggggagccatcttggttcctggatccctcagagactagtcttgcacgggtgagattgtggactacagtaactaacagcttctgggacaggcagaagccacacagcttctgggacagatcccattttaggctccagacatccgggcactttcactgccagaggagaggtgtccgccccacccaggagggctttgctggagcacctgggggagccctctctggtccaggatctctcagagaccagactgtataggtgagagtgtggacaacagaagctacacagattctgggacaggcagaagtgacacagcttctgagacaggccctgtttggccttcatcttctgccaggaggcaggtctgaatgccaggtatctgtgcaccttccctgcaagaggagagcttgcctgcagagagtactctgaccactgaaactcaggagagagctagtctcccaggtctgctgatagaggctaacggaatcacaagaggaacaagctctaaccagagacaactataacaactaactccagagattaccagatggctaaaggaaaacgtaagaatcttactaacagaaaccaagaccactcaccatcatcagaacccaggactcccacctcagccagtcctggataccccaacacaccagaaaagctagacccagatttaaaagcatatctcatgatgatggtagaggacattaggaaggactttaataactcacttaaagaaacacagaagaatactgctaaagaggtacaactcctaaagaaaaacaggaaaacacaaccaaacaggtagaagtccttaaagaaaaacaggaaaacacaaccaaacaggtgatggaattgaacaaaaccatacaagacctaaaaagggaagtaaacacaataaagaaaacacaaagtgagacaacgctggagatagaaaacctaggaaagaaatctggaaccatagatgcgagcatcagcaaccgaatacaagagatggaagagagaatctcaggtgcagaagattccatagagaacataggcacaacaatcaaagaaaatgcaaaatgcaaaaagatcctaagtcaaaacatccaggaaatccaggacacaatgagaagaccaaacctacggataataggagtagatgagaatgaagattttttcaacttaaagggccagcaaatatcttcaacaaaattatagaagaaaacttcccaaacctaaagaaagagatgcccatgaacatacaagaagcctacagaactccaaatagactggaccagaaaagaaattcctcccaacacataataatcagaacaacaagtgcactaaataaagatagaatattaaaagcagtaagggaaaaaggtcaagtaacatataaaggcaggcctattagaattacaccagacttttcaccacagactatgaaagccagaagatcctggacagatgttatagagacactaagagaacacaaatgccagcccaggctactatacccagccaaactttcaattaccatagatggagaaaccaaagtattccatgacaaaaccaaattcatagaatatctttccacgaatccggcccttcaaaggatcataacaggaaaaaaaaaacaatgcaaggacaggaactacgccctagaaaaagcaagaaagtaatccttcaataaacataaaagaagacagccacaagaacagaattccaactctaacaataaaaataataggaagcaacaattacttttccttaatatctcttaatatcaatggactcaattccccaataaaagacatagactaatagactggctacacaaacaggacccaacattttgctgcttacaggaaacccatctcagggaaaaagatagacactacctcagagtaaaagtctgaaaaacaattttccaagcaaatggtctgaagaaacaagctgaagtagccattctaatatcaaataaaattgacttccaacccaaagttatcaaaaaagacaaggaggggcacttcatactcttcaaaggtaaaatcttccaagaggaactctcaattctgaatatctatgctccaaatgcaagggcagacacattcattaaagaaactttagtaaagctcaaagcacacattgcacctcacaccataacagtgggagacttcaacacaccactttcatcaatggacagatcatggaaacagaaactaaacagggacacagtgaaaccaacagaaattatgaaacaaatggatctagcagatatctacagaacattttatcctaaaacaaaaggatataccttcttctcagcacctcatgttaccttctccaaaattgaccatataattggtcacaaaacaggcctcaacagatacaaaaatattgaaattgtccccatgcattctatcagatcaccatggactaaagctggtcttcaataacaacataaataatagaaagccaacattcacgaggaaactgaacaacactctactcaatgataccttggtcaaggaaggaataaagaaactaaagactttttagagtttaatgaaaatggagccacaacatacccaaacttatgggacacaatgaaagcatttctaagaggaaaactcatagctctgagtgcctcctaaaagaaactagaaagagcacacactagcagtttgacaacacacctaaaagctctagaacaaaaggaagcaaatacacccaagaggagtagacggcaggaaataatcaaactcaggggtgaaatcaaccaagtggaaacaagaagaactattcaaagaatcaaccaaatgaggagctggttccttgagaaaatcaacaagatagataaacccttagccagactcactagaggggacagggaaagtgtcctgagctatcattctcgccggcaagaacacactcggacaactggattcttctgcggcaagctttattgcttcttaagaagggaagacccagaccctggaaaatggtgctgcttatatagcccttagcatggtgtttcagcacctgatgtggcctgtcagctcctgatttgttgctcgcccatcacctcattacaacgccccgagatgggcagtgactaggtgtgagttcactctcgcacttgcacacaaggcttgtttactagttaggcacagtggaagccagcaccatcttataatggtgatttctcacggcacggctctccacaggaaaggatcctaattaacaaaatcaaaaacgaaaagggagacataacaacagatactgaagaaatccaaaacaccatcagatccttctacaaaaggctatactcaacaaaactggagaacttggatgaaatggacaaatttctagataggtaccaggtaccaaagtttaatcaggatcagattaatgatctaaacagtcctatatcccctaaagaaatagaagcagtcattaatagtctcccaaccaaaaaaagcccaagaccagatgggtttagttcagagttctatcagaccttcaaagaagacctaattccagtttttcacaaactattccacaaaatagaatcagaaggtactctacccaattcattctatgaagccacaattaatctgatacctaaaatacagaaagacccaacaaagatagagaacttcagaccaatttcccttatgaatatcgttgcaaaagtactcaataaaattctcgctaaccgaatccaagaacacatcaaaacaatcatccatcctgaccaaggaggtttcattcccaggatgcagggatggtttaatataaggaaatccatcaacataatccactatataaacaaactcaaagacaaaatccacatgaccatctccttagatgcggaggaagcatttgacaaaatccaacacctattcatgataaatagtcttggaaagatcaggaattcaaggcccatacctaaacatgataaaaagcaatctacagcaaaccagtagccaacatcaaaataaatggtgagaagctggaagcaatcccactaaaatcagggactagacaaggctgcccactttctccctacctattcaatatagtacttgaagtcctagccagagcaattcgacaacaaaaggagatcaaggggatacaaattggaaaggaagaagtaaaaatatcactatttgcagatgatatgatagtatatataagtgaccctaaaaattccaccagagaactcctaaacctgaaaagcagcttcagtgaagtaactggatataaaattaactcaaacaagtaaatggactttctctacacaaaggataaacaggctgagaaagaaattagagaaacaacacccttcacaatagtcacaaataatataaaataccttcatgtgactctaactaaggaagtaaaagatctgtatgataagaacttcaagtctctgaagaaagaaatcaaagaagatctcagaagatggaaagatctcccatgctcatgtattggcaggatcaatatagtaaaaatgactatcttgccaaaagcaatctacagattcaatgcaatccccatcaaaattccaactcaattcttcaacgaattggaaagggcagtttgcaaattcatctggaataacaaaaaacctaggatagcaaaaactcttctcaaggataaaagaacctctggtggaatcaccatgcctgacttaaagctgtactacagagcaattgtgataaaaactgcaagttactggtatagccaaagacaagtagacaaatggaatagaattgaagacccagaaatgaacccacacacctatggtcacttgatctttgacaagggagctaaaaccatccagtggaaaaaagacagcattttcaacaaatggtgctggcacaactggaggttatcatgtataagaatgtgaattaatccatttttatatccttgtactaaggtcaaatctaagtggatcaaggaactccacataaaaccagagacactgaaacttatagaggaaaaagtgggggaaagccttgaagatatgggcacggggggggggggtattcctgaatagaacagcaatggcttgtgctgtaagatcgagaatcgacaaatgggacctcataaaattgcaaagcctctgtaaggcaaaagacactgtcaataagacaaaaaggccaccaatagattgggaaaggatttttaccaatcctaaattaggtaggggcctaatatccagtatatatatatatatatatcaagaaggtggactccagaaaatgaaataaccccattaaaaatggggctcagagctaaacaaagaattttcacctggggaataccgaatggctgagaagcacctgaaaaaaaaatgttcagcatccttaatcatcagggaaatgcaaatcaaaacaaccctgagattccacctcacaccagtcagaatggctaagatgaaaaattcagatgacagcagatgctggtgaggatgcggagaaagaggaacactcttccattgttggtgggattgcaagcttgtacaaccactctggaaatcagtctggtggttcctcagaaaattggacatagtcctaccggaggattctgcaatacctcttctgggcatctatcccgaagatgttccaaccggtaagaaggacacatgctccactatgttcatagcagccttatttataatagccagaagctggaaagaacccagatccctcaacagaggaatggatacagataatgtggtatatttacacaatggagtactactcagctattaaaaagaatgaatttatgaaattcctaggcaaatggatggacctggagggcatcatcctgagtgaggtaacccaatcacaaaagaactcgcatgatatgtactcactgataaatggatattagcccagaaacttagaatacccaagatacaagttgcaaagcatgaaactcaagaagaacgaaaaccaaagtgtggacatttcaccccttcttagaattgggaacaaaacactcatgaaaggagttacagagacaaagtttggagctgagataaaaggatggaccatctagaaactgccatactgagggatccatcccataatcagcctccaaatgctgacaccattgcatacaccagcaagattttgctgaaaggaccctgatatagctgtctcttgtgaggctatgccagggcctgacaaacacagaagtggatgctcacagtcagctattggatggaacagagggcccccaatggaggagctagagaaagtacccaaggagctaaatgggtctgcaaccctataggtggaacaacaatatgaactaaccagtacctccggagctcatgtctctagctgcatatgtaccagaagatggcctagtctgccatcactggaaagagaggccccttggtcttgcaaactttatatgcctcagtacgggggaacgtaagggccaagaagtgggagtgggtgggtaggggagtgaggggggagggtctgggggacagttgggatagaatttgaactgtaaatgaagaaaatacctaattttaaaaaataaaacaaaaaaagaaaaccaatgaagattctgatatcaaccacacacatgcacatgcacgtgcaagcacacacacacacacacacacagcatccatccatccatccacatgcacatgtgcagataaatacaaataccacatgcactcaaaaatattttttcaaagatcgtaacaaacctctcatacattcttttcatacatccttttctgggaactataaagtcctttcatacaaccattttctggaaactataggatgctgcctataaaacaaaaaagtaacacagacatttaaaaaaaacagaaaagagaacatacaaaatgggggaaacaggaaatgaaaatctgtgtgatggtttctggatgacaactgtatctcaagctgagcaaacaatagttctccagtctgaatctttgtgacaagagtgaatggcatcttgcagaatatttatcagtgaatcctttaaaaccatatcatcttttcagtattaggaacctgtgttatttcttaaagccaatgagcaaatagaaaaatggagtgatacaaaaattccataactgggaaatttaactagaataaaagaaaatcccatagatgacaacaatgagaagttccaagatgacagctgtgtgacagccgtgtgacaggcgatgtagaaagcaaccatgcagaacaatggagaaacagactgagacagagagaaaaggccccacacacaggaaccaaggagcagagagctggtctcccaggagtgctgacaagcctgtgagcacaggtatgactaccacttctcctcagagggacccacccagagacctcaggacacaggaactgaggagcagcctgggacaggatccttctggtttctgtctgagccaagagccaatcatgtggcacagtggtcatattatacccaaatattttcacgagagagctggtctcccaggactaatgacacacctgtgagcaaaggaaagaccaccatttctgctcaaattcctggcccaagaggaacctgcacagagccatcaggacacaaaaccaagaaacagccagggacaggatcattctagtttctgcctgtagcccagagctgcccctgtgccacagctctccatactcaaaatcctcctggagagaactggtctcccaggagtactggaacacaggcttgcaggagggacaagccacaatcagagacagcaagaccagctaacgccagagataaccagatggcaagaggcaagggcaaaaaccttaccaacagaaaccaaggctacttggcatcatcagaacccagttctcccaccacagcaagctcttatagcccaacacatcagaaaagcaagattaagatccaaaatcagttctcctgatgatgatagaggactttaagaagggagtaaataattcccttagagaaatacagaagaatgcagataaacaggtagaagtccttaaagaagagacacaagaatcccttaaagaattacaggaaaacacaaccaaacaggtgaagaaatagaataaaactatctagaatctaaaaatagaaacggaaacaataaagaaatcatgaagggagacaaccctggagaaagaaaccctatgaaagagatcaggagtcagatgcaagtatcaccaacagaatacaagagatagaagatagaaactcaggtgcagaagataccatagaaaacattgacacaacagtcaaagaaaatgcaaaaggcaaaaagctcccaacacaaaacatccaagaaattcaggacacaatgagaagaccaaacctaaggataataggtatagaagagagtgaagagtcccaacttaaagggccagtaaatatcttcaacaaaattatagaagaaaacttccctaacctgaagagatgcccataaacatacaagaggcctgaagaactccaaatagattggaccagaaaagaaattcctcttgtcacataatagttaaaacaccaagtacacaaatcaaagaaagaatattgaaagcagtaagggaaaaagatcaaggaacatataaaggcagacctacagaattacaccagggccaggcagtggtggtgcacgactttaatcccagcacttgagaggcaggcagatttctgagttcgaggcccacctggtcttcagagtgagttccaggacagccagggatataaagagaaaccctgtctcgaaaaacaaaaacaaacgaacaaacaaacacaaaaagcagaattataccagacttctcaccagagactatgaaagctagaagatactgggaagatgttatatagaccctaaaagaacacaaatgccagcccaggttacactacctaacaaaactcttaattgccatagatagagaaaccaagatattccatgacaaaaccaaatttacacaatatctttcaacaaatctagtcctatcaagcataataaatggaaaatgccaacacaaggagggaaactacaccctagaaaaagcaagaaagtaatcttctttcaacaaacacaaaagaaaatagccacataaacataaaaataacatcaaaaataaaaggaagcaacaatcactattccttaatatctcttaacatcaatggactcaacttcccaataaaaagacatagactaatagactggatatgtaaacaggacccagcattttgctgcatacaggaaaggcacctcagtgtcaaagacagacattacctcagagcaaagggatgaaaaacaattttccaaggaaatggtcccaagaaacaaacaggagcagtcattctaatatcaaataaaatcaactttcaaccaaaagttatcaagaaggataaggaatcatactacatactcatcaaagggaaaatctaccaagaagaactctcaactctgaacatttatgcctcaaatgcaagagcacccacattcataaaagaaactttactaaagtttaaaggacacattgcaccccacaataatagtgagagacttcaacaccccactctcatcaatggacagatcatagaaacagaaactaaacagagacacattgaaactaacagaagttatggaccaaatatatttaacagatctctttataacatttcatcctaaaacaaaagaatatactttcttcgcagcacctcatggtaccctctccaaaattgaccatataatcagtcacaaaacaggcctctacagatacaagaagacttaaataatcccttgcgtcctatcagatctccatggactaaggcaggtcttcaataacaacaaaaacagaaagcccacatacacatgaaagctgaacaatgccctactcaatgataatttggtcaaggaagaaataaagaaagaaattaaagactttttggaattttatgaaaatgaaggcataacatacccaaactaatgggccacaatgaaagcagtgctaagaggaaaactctactctgagtgcctccaaaaagaaacttggagagagcatacactagcagcttgtcagcacacctgaaagctctagaacaaaaagaagcaaatacacccgagaggagcagacagcaggaaataatcaaattcagagctgaaatcaaccaattaggaacaagaagaactatacaaagaaccaacaaaaccaggaactggttctttgagaaaatcaacaagatagataaaccttagccaaactaaccagagggcacagagacagtatccaagttaacaaaagcagaaatgaaaaaaggagatataataacagaaactggggaaatacaaaaaataatcaaatcctacaaaagcctatattcaacaaaactggaagacctggaagaaatggacaattttctagacagttactaaataagggtgggaagcataattattacacaacaattttcctaatacattgcaagtgaaaacagacattaaagacttcaaatgtaacccagcttacaaaggactcagttgatgtctggagactaagatacatttttaaaatcagtagcagaggtgtgactaaaaaccagagaaggtgagaaaaaggcaggctcattgtattttacacctgttggtgttcctgggtttttggtggtggtggtgttttttttttcttgagataaaagctacattttatttgggggggggggggacatggattttaaaactatcaattacctgaagtttttacaagtctcatcacaagtagaaggtagataggatatgagacactgctgacaatattaggaaaagataaataatgctaacaacttttcagattttcttaaattttggtagggagtccgagttaagtataaacactggtgaggagtgcttttaagccaagataatttttttgttgttgttctactcttgagaaagagaatagcactcacaaaacgcaaggtggcgctgcaggctaaaaagaggaaaggtatggaaagggaaaggggagggatgcacaaaggatatatatttcagacttccgacaaagccataggaaatgatatagctagcggtagcaagccctggagaaggcacccctctcttctcacaggaattgctagtgtccaggtcattcctaaggattccagctgcaggcattccagggagctgcttgaggctaaatggaaggaatttggggttttattttgaaagtcttggaaagaatggaggccagattggaacaagctgtgcagaaaaggcaagtactgtttctttatgtgtttcttggagcgtcttgggctagcgccgaacagcttcagtattctgtggcagaggaaaccgagagagggactttcctagccaatctagcaaaggatttggggctggggctgggggaactgtcagcccgggaagctagaattgtttcagaccagaacacacgatttttactgctcagtccgcttactggagaattaattctaaatgagaagctggaccgagaggaactgtgcggccccacagagccctgtgtgctgactttccagttgctgttggaaagaccatttcagatttatcgcgctgcactacatatcaaagatataaatgataattctccagtattcctagacaaagaaatactcttgaaaatatcagaaagtaccactccaggggcgacgcttctcttggaaagggcacaggatgccgatgtgggaacgaacagcctgagtaactacaccatcagccccaatgattatttccatattcacgtgcatgatggaggggaggggcctatcattcctgaactggtactggataaaatgctggaccgggaagaaataccagaattcactttaactctcacagccttagatggtggctctccacccagatctgggacagccttggtgcaaatcttggtgttggacataaatgacaactcccctcaattcgtgcagtcactttacaaagttcagtcacctgaaaacacccctgttggctccttggttgtcgctgtgtctgccagggacttagacacaggaagttacggacaaatagactacacatttttttatgccacagaaagaattctccaaacgtttcaaatcaattctacatctggcgaactttatcttaaacgcgaactcaactatgaagcgattcaaacttattcgataactattcaggccagagatggtggtggactttctgggaaatgtgctgtggttgtagaggtaatggacgtgaatgataacccacctgaatttctcttgtcgtcacttaatagcccaattccagaaaattcacaagagacagttgttgctgtatttaaaattagagacagagattcggggaacaatggaaaaaccctgtgctccattgcgaatgatctccctttcgtcctgaagccatctgtggaaaatttctatactctggtaacagagaagcctttagatagagaatcaaacactgaatacaacatcaccatcacagtcaccgacatgggcatacccaggctcacaacccagcacaccataacagtgcaggtctctgacatcaacgacaacgcccccaccttcacccaaacctcctacaccatgttcgtccgcgagaacaacagccccgccctgcacattggcaccatcagcgccacagactcagactcaggctccaatgcccacatcacctactcgttgcggctgcctcacgacccgcagctggccctggactcgctcatctccatcaatgcagacaatgggcaactgttcgcgctcagggctctggactatgaggccctgcaggccttcgagttccacgtgggtgcaatagaccaaggctcccctgcgctcagcagtcaggctctggtgcgcgtggtgatactggacgacaatgacaatgcgcccttcgtgctctacccgatgcagaacgcctctgcaccctacactgagctgctgcccagggcggcagaacccggatacctggtcaccaaggtggtggcagttgaccgtgattctggccagaacgcctggctgtcatttcagttgcttaaggccacagagcccggactgtttagtgtgtgggcgcacaatggtgaggtgcgcaccaccaggctactaagcgagcgagatgtgcccaagcataagctgctagtggtggtcaaggataatggagagcctccacgctctgccagtgtcacactgcatgtgttgctggtcgatggcttctctcagcccttcctgattctgccagaggtggcgcgcgaccctgcacaagaagatgatgagctaacactctacctggtcattgccttggcttctgtgtcttctctcttcctggtatctgtgctgctgttcgttggagtaagactctgcaggagggcccgggcagcctctccgggtgtctgctttgtgcctgaagaacactttcctggccacctggtggatgtcagcggtgcagggaccctgtcccagaactaccagtatgaggtgtgtctgactggaggatcagggataaccagtgaatttaagtttctaagtccaattgcctctaacttcctaaccgaaagcacagggagagaaatagaataaaagctaaacccttctgcccatggatgaagctctaatgtaaactatacccttgttgtgtaatgaagaatgatttcatgttaacatctagaagttaactaatttaggacagaaaagaatacctgtatttattcccaaaaaccttttctttaatttatgaaatgcatgtgttgtgtgctatctcaaatctaatttgatttctctttgttttttaagatttgttgaactgcaatctattaaacaacaaatcttggtagagattgtttaagctgtttttccatatctacatttttcatttataattatgttctgagtctattggaattacatataaatgtagacataccctacatttgagaggttatattatatagatttttcaaagtttctttagtaattactgtgcatcatacatgatttcatcaccttggggacatggtctctctgtgtccatgtccaggatagctttgaacttttgattttcctgccccagactttcaagttgcagctaccacaggcctcagcctatcgccttctttatttcagaagaagccaataagtggcggtatctcaatgatgagcaagtagaagttggtagagacttggtaagatccataattattaactggcagagcagagccaaacaatctcctgattgtttccattttgtttttcttgtttgaagtgtggaaggttccttgttctgtccatctccaggcaggtgacttggcaacattatgctgttttctattactagatatcatgtgtcctactcacattgctcatcagcctcttctgtattcagaaatagctacactctgcttagcctagcctgcagcctcacttccttataaactcacacacacacacacacacacacacaccattgggagtttattatccaactactatttaagctctcagttaactaaatcttaacgtctaaaagagttgagtgttgggcatggtaaaacgcacctttaatcccaatacttgggaggcagatacagggggaatctctgtgaatttggaagcagcctggtctatgaaagagttccatgatacccaacggctacatagagagaccttgtctcagtaagcaagaggagatggggagaagaaggaggggagaaagagggggttctctacatcaaatttccatatagtgttgggttactctccctccagaaactcctgtttcttgtttgtgaaaatggagaattcacaacactccttggacctaggcactattatctcatctgtagataaggaatctagagcaaagaggataaataacttgcacaagattcacagctactctttctgtggttcatcacactaaaagtagataaatccccaaatcttcagttactagaaacatacatgcaaacacatgtatatatttcttgcaaatatttttccttacaggttgtgatttaaaagcgtatcttttgccccaaacgcaataagaattattgaatcattactctccagcaatgacatttctcttgtgtgaccttcaggaagttgtctgcccaagaaggcacagcaataagggaggtgggacttttatcttgcccactgccagataaaggtagctttaggtttttaacatccatttttatcacataaaatgttaagatgctgtgagaacacaaggcggcgctgtaggataaggaagcaaaacctagaaggcagttgtggttccattaataggggaaaagaaaaaaaaatcctgcagaagcccggaagcccagagaagcccggactggatgcttcagaaaggaggtctcagccctcggaaaaggactgaaagaattctcaggtatctggtgagataactacagtaccagatactaggggtgtttatagttctgctgaaacatccttcaggactctgtaccaccaagaacaatggaggccagcaggaagctcatttgcagacaaaggcaagtcctttttttctttctcctattaggcttccctctaacgactgcaggggaactgaggcgctattctgtggtggaggaaaaggagggtaggtcctttgtaaccaatttagtaaaagacctgggtcttgggcagctggaactctcccggagaggagctaaggtcatttctaaaggtaacaaactacatttgcagctggatcaggagacaggggatttgctgttaaatgagaaagtggacagggaaaaactgtgtgggcatacagagccatgcttgctaagcttccaagtgttgctagacaaccccttggatatttttcaagctgagctagaagtcacagacataaatgaccactcaccagaattcctggacaaagagatcatgctaaagatatcagaaagcagtcttcctggagctacatttcctctgaagaatgctcaggacatggatgtaggccaaaacggtattgacaagtatctgatcagttccaattcctattttcgagtgctcactcggaaacgaagcgatggcaagaaataccctgaactggtactagacagagcactggatagagaggaggaagctgagctcaggctaaccctcacagcacaggatggtggctctctgcctaggtctggaaccactgaagtccacattgaagtcctggacatcaatgataacgctcctcaatttgagcagcttttttacaaagcacagatccctgaggatagtccaataggctttctgatcatcactgtctctgctacagacaaggacattggagtcaatggacagatctcctattcacttttccaggtttcagatgatattagcaaaacattttcaatccaccccttgacaggggaagtgcgattgaaagaacaccttgattttgaaaagactcagtcctatgaaatcaatattgaagcaagagacgctgggaccttttctggaaaatgcacgattctggcccaagtcttggatgtgaatgaccatgctccagagattatcctgtctgcatttaccaactccattcttgaaaacttaccagaaaccatggtggcagtttttagcgtttctgatctagattccggagaaaatgggaaagtaagttgttccattcaggacgatctacccttcttcctaaagccttctggggaaaacttttatacgctgttatcacaaaaaccactggacagagagagtgtagcagaatacaacatcaccatcaccgttgcagacatggggagtcccatcctgaaaacacaagtcaacttaacagtgcaggtatctgacatcaacgacaacgcccccatcttcacccaaacctcctataccatgttcatccgtgagaacaacagccctgccctgcacataggcaccatcagtgccacagactcagactcaggctccaatgctcacatcacttactcgctgctgccgccccatgaccaccagctggccctcgcctcgttcatctccatcaacgcagacaatgggcagctgttcgtgctcagggcactggactatgaggccctgcaggcctttgaattccatgtgggtgccacagacggaggttcgcccgctctcagcagccaggcgctggtgcgcatggtggtgctggacgacaatgacaatgcgcccttcgtgctctacccgatgcagaacgcctctgcaccctacactgagctgctgcccagggcggcagagcccggatacctggtcaccaaggtggtggctgtggaccgcgactctggacagaatgcctggctgtcgttccagctgctcaaagctacggagcccgggctgttcagtgtgtgggcacacaatggagaggtacatacctccaggctgctgagcgagcgcgatgtgcacaagcacaggctgatactgctagtcaaggacaatggcgatcctccgcgctctgccagtgtcacactgcatgtgctgctggtggatggcttctctcagccctacctgcctctgccagaggtggcacgtgatcctgatcatgaggacagtgagctcacattgtacctggtcatagccttggcttctgtgtcttctctcttcctggtgtctgtgctgctgtttgtgggggtgaggctgtgcaggagagccagggaggtctctctgggtggctgctctgtgcctgagggacactttcctggccatctggtggatgtcagtggcacagggaccctgtctcagagctaccaatatgaggtgtgtcttactggagactctgggactggtgagttcaaatatctgaaaccaattttacctaattttcaagaccattcttttagaccagaaatgggtgaaaatcccaactctaggaatgactggagttttggtattcagttaaaataactgcttttcatcatgtgtactggattttatcatatactcaactacttttcttgctgtgcccattttgaacttctaaaacatacttaaaacttgtttgcaggctattctctccatggttttagaaagtatctcagcttttctccaaactggaagatgaaatgttttaatcttgtttggttttgtttgtttgtttgtttgtttaatgtatcactagttgcacaaatctttgttctgggatggtttggaaatgtacaagagggtaaaaaggggaaatcaattcaaccgaatcagatggaattcagggtgtgttctctcactgaatacacccgacatagcaatgctcaaacacaacgaggtctaatcagataggagaacgaggggctcactgggacctctgccttttgctttatttggcctctactggactgtctttgttgatgttttctcttaaaaatcttacttagccacatggttcctcattagcttgctattagttttcatatcactactttaagctgctttctactttgttcgtttgcttgcttgcttgcttgcttgcttgcttgttttttggttggtgttgaggtttcagaatggtgtcccttatttacctggtaggttgaaagagcatagcagtagcattgagttttcacttctgttaaatacttgccagtcagagaaactgcatcagccagtattgattttttttcctttctttgttgccattccacatttctttcttgccagtcatgtgcttagttaaaagaatacattttcactgtctttttttttttctctagcaaatagattagggcatatggttagcttatagtgagatgtaagatgtggtgccttccacagctcttcagttgaagagaaactgggggggggacctatgcataccaagtaaggtctgtctctctgatctaccactttcaatacccaagaacacttgtaaagggagatgtctcacctggaaagggatttcaccctttgttcatgttatgttcttcctaggatgttcgtggtataatgagcgcacaaatactcatgttggctctgtgataggtgtgacgggctaaagtagcatgaaatggacttagctgtgatgatccctggcaactcaggagttctcatattattccccgcgttgccaatttcttagcctttttaaacattcagaaataaaggaagtcccatgtcattattctagcttttatgctatggtcagttcttatgctatggaatctatttgtgtgtttgtgtgtttgtgtgcctgttggtgcatgagtgcttgcagatgtccttgcgcctctgcatgttgaggtcggaagttgatgtctaccttcgttgctcagttatctagactagccagggagctctgtggaaacactgactaactggtcatgattctgggcaataaaaggaaaagtctgagatccaatcctagttacctgattctaatgacccagttcttagtaatatgctttactgataagcatatactggtagcattattttcctatgaagagaaatccatttgtcccactccatgaataaaatgaccctgtgtaaatgtaatctttagctcatagtttgtatttctttctatagcagtgaccacactgcttagaaaataacccaaagggctcacaaaaatcaatgacctaagtaaattggatcacactacaactgctctcttcatgacgaagaaatcagcctgattatattcttgtgggcactcaatgagtcacatgctttattgtggaagtgagttgtcctatatgggcagcagaatcactctatggttgtgtttattggaccttatctgtctcttcagtcatcttctataaactctaaaatattatacacttcatattcagtgggcccattattaaaattaaatatcttatgctcacttcagcattgtgtatgtgtttgaaagcaattgctttctagaagtttagctgaaaactaattttaagaaaactacaagcaatattatggatgaattttcacacttaaataactgagagattcttgaaattctgtaaaaaaaatgatgtttctaattactttctggtgcagttaaccttttatctttggcaaaataatgcccgttgatgccttcttttaaataatactataaaacatcagaggaccatacatgactttttaagaagaatgatttggcacaactgaataagaaattctttagcacttaattatgctattcatatagaagctatcagtttttggtgttttcaaacaataatccatatttatgtcctgttctgtttctctgttgctgtcagaaaattcacaagaagttgcttaaaacaataaaatgtattatcccatagttttgtaaataaaaaaaaaaaaccaataagtgtctaattgaactaacaagagaagtccatgggaacacattgtgctctggagactttatagaaccttttttgtcttttccatccagatgttgcccacattacatggtgcatggtcccttcaacttcacagcatgtaacgtttcttgtatagccattttctctgacccactctgaaaatattctttgaataaaagttctttatcaaaataaataaataaataaataaataaataaattctttatccaaatttgataagtctcctatttagataatgaaggacaatctcctattcaaagaatcttaaacttaatcagctttgcaatggattctcttgccagattagataatataattacagattctatggtatatttgagtggctattattctgcctagcaataccacctactgtcaaatggaggcacataaagcttattataacaggagtttaagcctcattgacttaaggaatctaattaaacaaacttgtagagacattaccaaaaactatgaattgataaaggcatcggcatttgtgtggtcctggagttcaaaccctgagcttcacaaaggctaaatgtgctctatcactgagctccctgtcctgtccattgtgaattttcactgcaactcaattcaaattatataaacagacaaacaaaaatacaaagataatgatgcaatttcaatctaaattcaatatagaatttaaactctgttttataatagatttaaaatctaaatctatttctcaaactctcacagctcaattattaaaagatgaacaattcaattaaaaataagcaaaacccagaatagacatttattttccatagaagataaacccatggttaatatgcacatgaaaaactgtgcaacaacctcatcagggaaacacaaatcaatatcacagcaagacactcatacctacttggatggctagaaccaaaaaaaaatcagattttggggaagatgtcataatattgaaaccctgatacacggctgacaaagtataaaatgctgcagccgtttttaaagacagcctgccagattttcaagtagccaaacatagagctatcataccgtaagcaattcaactcctagagaaacaaaaatatgtccacaaaaataggtacgtaaatcttcatagaaacaatattcagaagagcagaggggtagaaacattccagatgtccaagtacacatgagcctgcatgagccagaagaaagtaatgaaatactgacacacgctgggatttggatgaaccatacaagcgtcaggctaagggaaggaaaggtagccacaaggtccacacattctgtcactctggtcagatggaagtttacaatggagaatcagtagggaccagaaagagagactgatcattccctttaggctctgcatagggggaaggagaaaataattgttaaaggatgcaaggttcttctttggtgtaagatatacgctccaaaactgaccttgatgatgagcaaatcacatggttactatattaaaaggctcgaaactttatactttcaaatggaaggatatatttaaatatacattatatcccaaagcacagacactatttatgccaaatataagaatcgatagaggcccacatatgtctattgtgaaataattttctggtagttgaacactgggaaaacctacgcttctctcccttggatattgaagagaagaagggatccatctgtactttaacaaagcatgtctatattgtgtagaatttgcaggttgaaactttgcattgactactcatttgttactctgtactgtgtatggtggaaaatatgtgcgtgaaaaactgtccccgggttattttttttttgagacatttttacccctcggtgtgtgttctcaggttaaatgttgaatacactatctcatttggttattgacacagcaacagcgttacatactcaacaccatgagtgagaatttagttttgtacttgttttcatacaatagctcagtgttttgtccatacacgtgaaagcaacttagaaaaagaagccagtggttgcggttacatagtttagttcatgggtcttggaaaattttgcctttaaatctgaaaatgtaaggctccgtgagaccgcacggtggcgctgcaggttaagaagacagagcatagaaattgcttgtgtaattcccttgtcagggccagtttctcaccacctagaatcaaagggtgtgtctttttcggccaaagcataggcgagtgtgaaaccttagatattctatttggaggcttgattctcacgttctggactgtgagatagtgctgtcacgatcctggacatatgtgaagctactgtgaagcaaacgccgaggaaagagccatggagactgcatggatgtgcaatctgagacaaaggcaagtcctggctttctttgttttgctgcatgtgtcaggggcaggggcagaactgggcccctattccatagaggaagaaacagagaggggctcctttgtggcaaatcttgggaaagatctgggggtggacctggcagagatatccaatcgcagggctcggatcatttcccaagaaaacaaagagcatttgcagctcaaccttcaatctggagatctgctcataaatgagaaactggaccgagaggagctatgtggccccattgagccgtgtgttctacacttccaagtgttaatggaaaaccctttagaggtatttcaggctgaactgagggtgatggacataaatgactattctccggtgttcagtgaaagagaaatgatactgagaatactagaaaacagtgctctgggagatacatttcctttaaataatgctctggactcagacgtagcaatcaacaatatccagacctataggctcagctcaaactctcatttcctggttgtaacccgcaaccgcagtgatggcaggaagtacccagagctggtgctggagaaagaactggatcgagaggaggaacctgagctgaggttaactctgacagctttggatggtggcgctcctccccggtctgggacggcacaggttctcattgaagtagtggacatcaacgataatgcacccaagtttcagcagccaacataccgagtgcaaattcccgagaacagtcccaccggttctctggtactcacagtctcagccaatgacttggacagtggagattatggaaaagtattgtatgcactttctcagccttcagaagatattagcaaaacgttagaagtaaaccctgtaaccggggagattcggctacgaaaagaggtggattttgaaactattccctcttatgaagtggatatcaaggccacggatgggggaggtctctcaggaaaatgcacgctgttactgaaggtggtggacgtgaatgacaatgccccagaagtgatgctatctgctcttaccagcccagtcccagaaaactccccggacgaggtagttgctgttttcagtgttaaagatcctgattcagcgaacaatggaaaaatgattgcctccatcgaagaagatcttccctttcttctaaaatcttcagggaagaacttttacactttagtgaccaagagagcacttgacagggaagaaagagagaaatacaacatcaccatcactgtctctgacctgggcacacccaggctcacaacccagcacaccataacagtgcaggtctctgacaccaatgacaacgcccccgccttcaaccaaacctcatacaccctgttcgtccgcgagaacaacagccccgccatgcacataggcaccatcagtgccacagactctgacgctggctccaattcccacatcagctactcgctgttgccttcccacgacccgcagctggccctggactcgctcatctccatcaacgcagacaatgggcagctgttcgcgctcagggcgctggactatgaggccctgcaggcctttgagttccacgtgggtgcaatagaccaaggctcacctgcgctcagcagccaagcgctggtgcgcgtggtggtgctggacgacaatgacaatgcgcccttcgtgctctacccgatgcagaactcctctgcgccttgcacagaactgctgcccagggcggcggaacccggatacctggtcaccaaggtggtggctgtggatcgcgactctggccagaatgcctggctgtcattccaacttctcaaggctacggagcccgggctgttcagcgtgtgggcgcacaatggcgaggtacgcactaccagactgctgagcgagcgcgatgtgcccaagcacaggctggtcctgctggtcaaggacaatggcgatcctccgcgctctgccagcgtcacgctgcacgtgctagtggtggatggcttctctcagccctacctgcctctgccagaggtggcgcgcaatcccgcgcacgatgaggacgctctaacactgtatctggtcatagccttggcatctgtgtcttctctcttcctcttgtctgtgctgctgtttgtgggggtgaggctgtgcaggagggccaggtcggcctctctgagtggttattccgtgcctgagggccacattcctggccatctggtggatgtcagaggtgtggggaccctgtcccagagctaccagtatgatgtatgtctgatgggcgattcttctgggaccagtgagtttaacttcttaaagccagttttccctagctctctagaccagtgctctggtaaagaaatagaggaaaattcctcactccacaatagttttggatttcatcattaacagaaagcttcttaacagtatttacttcccaatattgttgttgattagctaatgtctgttcacctgtgactagcaacaattttaattttcactttgcctgtcctttttcaggctcggacctcatgtttggttttactcatatttgtagcacaggatttttcataggctctcagaaaaccaaaaggttttctctgcagttaatgcattcgctgaaacttttctagcactttgtttttcttcctcacttgctctccatgttttatgttcctagacttcttgaattattaaaatactgtgttgcatgctatatacatacataatagttggtatttctgcatttcctttctatactgccagacttggtgattagccacctttgatttttgttatatatatataatagttgtcttaagttatgctagtattttatagctttatttttctttgtttatatatcttgatttaaaaattaatttctgtcataagtgatacaagtatctagtgaacctggaaataagaatagtattgtaagatattgagttggtgtacatgtgcctaaatttgtgaaaatcgaggtaatttgggcattagaaggtatcaaatagaagtatataaatttttcttttaattctgcatgaaagcctagaaattgacgttgagttttcaatggcttacaatctagtcacactcttttgaataatcttttgaataaacaatgtatatttatcatcatataaatggtgtgatttttccattcaacagagatgggatttgggggtcaatctaatcttttcttatacacattctgaggtttggtctacgtcacttgcttatatgggaaaattagaatattgtaggcctttgaataaaaaaacgaggaagatattttatcgctatatccttgctttcagcaatgttaggatctgtactgatttgtcatggttctggtctgtattcaaggcacagtaaatagattgtattagatttcgttaagagggacatttaaagaaaggtaaggcttttctttaattctattgatgaaggctgttttaaggaaataaagataaacaagaggaaagcaacagaaacttcaaagtatgtgaaatgaaaaagcgtgaatttcagatggtaggagctgaaggacacgtgctgtttcttgtcctccttacagttcatttgtgcattattttattcaataaatagtaactgaatgattttccaaccagagataaggtacagttcctgtccaaattagtcacatatagagggaaaggtagattctgataaaactagaagctattctatttacataataaacagagtgtgtgcataagtcacagtcatgtgcattctggggcacagaagggggcagcgtgattgctcagttatggctgcaaactggcgcttctgttagagaatgtgatagagttggaataagttttctgagaaattagtgaaacatttcgtttgcacgttccctgtgttcctgtgcctgtttccagaactatgaaatatgttatcagaaggcatgctcacattgtcccctttgtttgcatgagcgggtgccagagacaaaatagaattagcatggagttcaatacagcgttgaaacaaagttactgctacaaatcttttattcaaccattaaaattttaactttcctatgaatctgtgaagaaccaatttgaacggatgtctatctcaacattattttcaaaaatccaacaaaagaagaaatgagaaaccaaaataacatgctatgggaaatatttcataaagatgtatgtgtgggcacaaaaaattagatacagccatttttaatctgttggaaccacatggtggcgctgcaggctaaagaaatgcaagggagattaaagtgagtctgcgctagaagtcaaaaaaaaaaaaaaagagcaaaattctgaccgatgagggggaaagctgaggctcctcacaactgaaggaaaaatatatcctagatccttccagctaggtggaacatctgaggtgtatgactgctaggagctgtgctgacacctgtagtaaagaaagaagaagcaatggcagccagaggatcatgtgtctccagacaaaggcaagtgctatttctcttcctgctcgggggtctgtgtttggcaggttctgagcttggacgttattcagtgactgaggaaacagaaaggggatcatttgtggcgaacctagcaaaggatctagggctaggggtggaagcactggctgcaaagagaactagggtggtttgtgatgataacaaacagcacttgtttctggattctcacactggagatttgctcacaaatgagaaactggaccgtgagaagctgtgcggccccacagagccctgcatgctttatttccaaattttaatggataacccctttcagatttaccgggctgagctgagaattctggatataaatgatcactcacccatattccaggacaaaaagatgattttaaaaatactagaaaacacagctgtgggaacaacatttcgattagaaagagcacaagactcagatggcggacggaatggcatccaaaactacaccatcagccccaacactttttttcatattaccgttcataacagcgatgaaggaatgatatatcctgagcttgtgctagacaaagctctggattgggaggggcagccagagttcagtctaacactcactgcacttgatggtgggtctccacccaggtctgggacagccactatacatattctggttttggacatcaatgataatgccccacagtttccccaagaactgtatgaaatccaggctccagaaaacagtccaataggccttgttgtcattaaagtcaccggagaagatgtagactctggagtcaatgcagaaatatcctattcgttttttgatgcttctgaggatattcgagcaacctttcaaatcaatcctttctctggggaaatcactctcaaagccttgcttgactatgagttcataaagtcctataagttaaatgtacaagcagttgatggtgggggcctttcggcgagatgtacggttctagtgcgggttttagacgttaatgacaacgcccctgaactgatcatgtcatcacttgtcaacgaagttgttgagaactcacctgaaaccgtgctggcagtttttaggattaatgacagagactctggagagaatggaaaaatggtttgccacattcaagaaaatctacctttccttttaaaaccttccgtggacaatttttacatcctaatgacagaaggagcactggacagagagagcagagctgaatacaacatcaccatcactgtctctgacctgggcacacccaggctcacaacccagcacaccataagagtacaggtatctgatatcaatgacaacgcccccgccttcaaccaaacctcatacaccctgttcgttcgcgagaacaacagccccgccatgcacataggcaccatcagcgccacagactctgacgctggctccaatgcccacatcacctactcgctgctgccaacccaagacctacagatgaccctcacctcgctggtctctatcaatgctgacaacgggcaactgtttgcaatcaaggctctggactatgaagccttacaggccttcgagttccacgtgggtgccacagaccgaggctcacctgagctcagcagccaggctctagtgcgcgtggtggtgctggacgacaatgacaatgcgcccttcgtgctctacccgatgcagaacgcttctgcgccctacaccgagctgctgcccaggaccgcagagcccggctacctggtcaccaaggtggtggctgtggaccgcgactctggacagaatgcctggctgtcattccagctactcaaggccacggagcccgggctgttcagtgtgtgggctcacaatggcgaggtgcgcaccaccaggctgctgagcgagcgcgatgtgcccaagcacaggctgctgctgctagtcaaggacaatggcgatcctccgcgctctgccagtgtcacactgcaggtgctgctggtggatggcttctctcagccctacctgcctctgccagaggtggcgcacaatcccactcaaggggaagaggatgtgctcacgctgtacctggtcatagccttggcatctgtgtcttctctcttcctcttgtctgtgctgctgtttgtgggggtgagactgtgcaggagggccagggcggcctctcttgggggctgctccgtgccagagggacactttcctggacaccttgtggacgtcagcggtacaggaacactgtcccagaactaccaatatgaggtgtgtctaatgggaggttcctctggtaccagtgatttcaagttcttgaaatcgatttaccctgaagttcatgcttatagttcccaggacaatagtgatgggaatcccacattttgaagtttctaatttaattttgagtaatgtttcattccatttaacatataatacagccatatgaatattaatttgtatagtagttgctacacagcaaaactaacttcgttttcaacttccaagtaggtcacatttagatttttacagtgtttttactttagtactttagtggttgtttcatgcttgtggtttttgtttgtctatttatgtttttgttttcttttctttctagtagagtattgtcactttaaatttgaggttttatcgtactcatactgtacgattatttggttttatttctcattatagaaaactgaagcttgaggtttcgttgttattgttctcttttcttttgttgctaagaattgaccaagccttttgcatggtaagaaaatgctccaccatagagctctatctccagccaggcatgctttatactcacttttaaaagctgtatattcttttaactttcactgagtccgtttttggcagtttcatgcatctatctcctgcattctgtttatgataatctcttgattaatctccttgcaacccctattcctcccttacaaatcccttggcatgttgctgattttgagtgttctggtaattttatgcactatgttaattaatgacttctgcatgcatggagtcatactttggactcaatcattcctaactcttgtgtcccacttgtttccttccttttccaagcaagtaccccatgctgctttctaaacatggctacttcattgcccttatttcccatcttccttaagagttctttcttttttatcttttctttgttttcaaaccagagttgctttatgtagatctggtatatcttgcatataattttaatatgcaaattaattgtatcctaaaattagttctgcagaccaggctgacctcaaactcatagagatccacccacctctgctgcccgaatgctgggattaaacttatgtatcactaccacccagcaagagctcagttttatgttcattcttggtgacatatatggcaaattgtgtcatataatgctaatacaatgtgatagtctgcatgtaaatcagcataaatttgagcacatttaaattttatttgacaatattgatggactggttggaaagataactttcttgttatattgaaactttaaaagttgtcaaatttaaacattgaaataaattaatggttacagaaagttttctctccagtccctttctatacagttgttcttcgactttgacctacttccagacaatgtttaactgccttatctttataatcagcttttatgtgttacccactttttgcagttcttatttcacattaatagacacacttacaaaaggaactcatttcccttatcctagggtttttgtagaataatcataaaatgttatcagttttgtttctgtgggtttctatgctcaaacccaaggcctcttaaatgaataccatcctgaagtaaaactaatattaatgtccacctgtataggtttcctatgtacacatacttagtagtgcagtatgattacactttgttttttggaaaaaacatcttttccaaagctaacagttgctgttttagatttggctttatttccattcgtggttagtgatttttctgctcctctctttccatattaagcgatcaatcaaagcagtgagttaccttgagctgcactctctgttctcactactgttttttacatcatatccctcttgaatattatcttcttgccttcaaatattcaaatatataagatgcaaattattgtgtttatgtactaggagctttcgttcataggtcttcttttagatggtttaccttgtggctgtcatgctttaatactttttccacactgctggccttttataggacccagtatcatgtctgagtttactttcttacttggttgacagacaatttcattgaaatagatgcagaggcacttaggagaaataaaacaacttttgatactttacatagtgaagcaatagtttcatttgattgatagtttgactgggtataaaagtataatttgaaaatttctccctcaacgttaaaaagcacttctccttttcttaattgtgtagaactacttttcacagggacaattccattctaaagcctatctctttttctgaaattttcccccatacattctggaagcattggaaaacttaccctcagtagtctgagaatactgtagctgtggctatttctttgttaacccattcatgaggataaatcctgttgatgttgagattcacaatttagaaaataactcattttagcttgctataatttctcacttgtattttctaaaaatcttgattaaatatttaattaactggaagagttctatgagaccctaagctcatttcattttgtattttcactctatttggtccatgttctactttcttgcactgctcatttaatcattcaatcttgacttgtaagcttgctttttggtaaataaatacttttagaagttttttggttttgttatttttttgaacagtgtgcattggaagtgtaatatttttcttacctgtaatttaccaccttagactatattatgaaaatatgctgtataatattattagtatcatattgtcattctaaaaattaagtgtgagtcacaaaagttgaagaattttaccaaaattatacagtttgtaagggacactgaagtctcctaatcagttttgttacctttttcaactttgaatcagggtctcaactacacagtcagggtattctccaatttacaatctttctgactctgcctcttgtatattgaaactacaggcatatataatccaatatgccccatcatttctcttataataagaacaatactccatacaaatgttattaacatgaaatgggtacatgcatttgaaacacaaagaatcatggaagatgtaaggaaacatttgttttgtggattttatttttctggagatattgatcagatatttcctcttgtttctttttgttttgtagttgtattggtgtgtgtgcgtgtgtgtgtgcatgtgcgtgtgtgtgttgacaattctcttgtctgcatctactgtctgtgctttgactaaagatgtgcagtactggatctgcttttttaatggatactagtgactaaactcagatccagctttgcacagaaagtgttttactcaccacattatctttatggccatggacattggtttgggcccttctacttcatgttatagatatcctctcaaatatcatgtagtccttggctgtgttctcataatgaagaattctgcatctaaaacactgggtatcaaccctctgtgactgaacaggcatggacagcaaggcttcattccaatgttaccatgctaaggcagaggtttttctaggcagagccacatcagtaaatataagaatttatttgagctttcacgcttttcatgttagaattctggaaaaacttgtgtgtgaggttatctgtcaatagcacaccttgtgttctacagtctgagaatgttgcttgagaagatacttgaagtcttagaatttaaaaatctaaatctaaaaatctaaatctaaaaatctaaagttctacttttgtttagcatgacttaagtgtcaaagactaaagaaagtttgctaatctcttcaaatcaagtatccattctctactatgagtgacttttttttgtctctgtagacattgagaacagagaattcaaccttactgtaaatacagtttcaattaataacttgttcatctcaagattaatttaatcttcccatttctttgaatctgaaatgtaaatgctattttgttagacaaacatgttaatttctgtttctccagtggtggattttttagccatttcctagaagttcttagtgagtttcttcctactgctttctatcattaaacacatgtgtgctacctgtataccttaattttgtgagttcacaataatcattacttttctatcagcttaatggatattttaaaggtggaaagataactgtgcatatatccaggccacatacctttcaatttttctcttttgtgctggtttttttcaaccatatatagaacttacatttttaaaaattcaactcaaattagcatttttccattggaactgtttcgaatgagctggggaacttttgaaactgtcaatagtggatatcattgatgagttcctagcatttattcccaacattctcctccttcagtggcaattgtgaactccagccagggccaagtttcagagatggttctagtcagagtgaagcaagcacacattaggctctgtcactaaaagctatcctcattaatgctatattcaagtagccatatactgcttcattagcaggaacatggcattaattgattgcatttacagattaaatatttgctttccttaggaaatcaaatgtctatcctttttcctctctgaactgctgtgtgtagttggcagaatacatcctaaggtcagccttaggagagtatgagtgtcctttactcaaaatggcacaattgaattgtgcaccacttactgaattgttgtaacttgtaagaaactgcaactaaactatgactttttataatgtattccctaaagtatgccatctttcataatccaaggataacctctgaaacgttccgtgaacactatctctttgccttttcacctaaccaaggccaagtgataaagggatgtgttaaacttaacaatgttatagtcctgaaataccaagtgctttaaaacaaacactgacatcatcatgagccataaagaacactaatgaaaaaatatactaatcaccacaaaataaatatttgtctctgagagaaatttgatgtgaaggaaacttaagtagcattcatcaaattgtgaaaacctgtgaagacacatggtggcgctgcaggataatgttacaggaaaaaaggaattacattaaatgccgcagacacagcccaagtgagcacagaaaactagaaagaaaaagaagccaggagggtgctacgtagaaaccttttgtccttcggattctgaggattccgtggacaaatcaaggggcacgttttgcagaagtgtgtggtgaagcagaagtgattctgccagaagccttctggaaagcaactatggagaatcaagagggactctatctgcagacaaggcaagtcctgcttctctttgttttcctaggaatgtctcaagcacactctgaggctgggagactttcagtggtggaggaaatgctgagtggggccttggtagggaatttggtaaaggacctggggctccaggtggatgagctgtctgcacgagaggctcaagtggcctctagtgataataaactgcctttgcaattgaacataaatacaggagatttgctccttagtgaaccgctggacagggaggagctgtgtggctccactgagccctgtgtgctccatttccaggtgttactgaaaaaccccttaaagattttgcaagctgagcttcaggtcacggatgtaaatgacaactcccccgtattcttggaaaaggagatggttttagaaatcccagagaacagccctgttggtgctgtgttcttgttggaaagtgcgatcgatttagatgtaggaatcaatgctgttaaaagctacgagataagccagaactctcatttccacgttaccatgagagttaatcccgatggcaggaaatacccagagctagttttggacaaggcgctggattacgaggagcagcatgagcttcgtctcatcctcactgctttggatggagggacgccacccaggtctgggactgcattggtccgagtggaggtcatagatattaacgacaactcccccgagtttgaccacatgttctatgaagtgacggttccagagaatagcatgcttggctcactgcttatcactgcctcggcttgggatttagactcaggaattaatggtgaagtatcgtacgccttttcccatgcatcagaggatattcgaaaaacatttgcaattaatgaacattctggagaaatacgtttaaaaggctatttggactttgaaacaactgaatcctactcgataatcattaaagctactgatcggggaggactttttgggaaatctacagtaagaattcaggtgatggatgtgaacgacaattttcctgaaatcattgtgtcatcgtttatcagtccaatcccagaaaataccgcagagactttagttatgatttttagcattcgagacaaggactcgggtgagaatggcaagatggtgtgtactattccggagggtctcccgtttgtgctaaaatcttctattgaaaattactaccacttagaaacggatggagcactggacagagagagcatagctgaatacaacatcaccatctctgttacagacctgggcacacccaggctcacaacccagcacaccataatagtgcaggtggccgacatcaatgacaatgcccctgccttcacccaaacctcctataccatgtttttccatgagaacaacagccctgcattgcacataggcaccatcagcgccacagactctgacgctggctccaatgcccacatcacctactcgctgatgtctgctcaggaccttcaaatggccctctcctcgctaatctccattaacgctgacaacgggcagctgttcgcgctcagggcgctggactatgaggtcctgcaggccttcgagttccaagtgggtgcgacagaccgaggctcacctgcactcagcagccaggctctggtgcgcgtggtggtgctggacgacaatgacaatgcgcccttcgtgctctacccgatgcagaacgcctctgctccctgcacagagctgctgcccagggcggcggagcccggatacctggtcaccaaggtggtggctgtggatcgcgactctggccagaatgcctggctgtcgttccagctgctcaaggctacagagccagggctgttcagcgtgtgggcacacaatggcgaggtgcgcaccaccaggctgctgagcgagcgcgatgcacccaagcacaggctgctgctgctggtcaaggacaatggcgatcctccgcgctctgccagcgtcacgctgcacgtgctagtggtggatggcttctctcagccctacctgcctctgccagaggtggcgcgcaatccagcgcacgaagaggacgccctaacactctacctagtcactgccttggcatctgtgtcttcgctcttcctcctctctgtaatgctgtttgtgggagtaaggttgtgcaggagggccagggcagcctctctgggtggctgtactgtgcctgagggacactttcctgaccatctcatgggcattaacagtgcgggaactctgtcccagagctaccagtatgaggtgtgtctgatgggaggtagtgggacaaatgagttcagattcttgaagccagtttcccccaatttacaacctcagttccctgggaaagaaatagaggaaagctctactttgcgcaatagttttgggttatttagggactgtaattgatgctgtattttattttgtggctattccatgctaatgtgtatttctccgaatttgcatgatctttaaatctaatgtttgcattttattatgtccctcccacttttcaatttatgccagcgcttgtaataagatggtaatttattctgtagcccattctctctgatgacctaactcgtaaaaaatttaccctgctccccttcccacctgtcttttccaacactttgacttgcatttttgcttatgatgaaataaacagaccattttaggagtagttaaaaattttaagcatatcttttgttaacttgtggcttgttattatgggtgctattttcaagaaaacttttttaaagcaccctagtttaattttttaatgtttgttactattgaatatattgattgcattggaaaatctattctgtggtacaactattaggcctgttgagaaggagccaatagtgagtttggggacagctcagtgatagatacccaaatagataaaaacacataataaacaagtggggacaggtggtggtaagctccttactaacactatcttatgtattctggaaggtggctacaggggtacatgaatactggggttacttataaaatcttgaaatataaggccttaattttacaagtgtctcactaactttatgaggacagaatgtaagccaggtggaagaaatggcacctaaacaatcctgtgaataggagaaagcaagcctgtgagataatatacaattttgcttatgttcccccatgaaataaaggaatgtgcactgagtactaattcacaagtacacacatttgctgtgcatattatgcaacattcaaatctaatggaaagagtacttagtctattgtgagtttgaaacttcctctcttattctattgcttgaatttcctgatatggtcataagccactgagtctgtctcagattccactgaagagcagcatccaaaagtatgatgaccacatttttttaacatatgaatgtgtcatgtcctaattgtaaataataataataataataataataataataataatttcaaccaccacaggggagagttttatcttgggtagagaatgaccagtctataacagttcttgtccttgaagactgacaattactgggaaatataattgttttacatgaatagtacgtacgtaattacagggaaaatgtaacggttgagagaggaagtctcctgtgaatttcctaacaagtctaaagtctgtatttctagaaggaggaaaatgagagatgatgagcatcatggagagagaaagatggtaaagacgtgacaataaaggatgtgagggcgaactaagagaatgctccccatcccatggactagagacagcgtctgccagaaacattctttcaaagaaacttaacactgtgttacttaacattttaattagttagttaaaacccctcccacatccaagacaacccagtgtttatactttttgaaagattccattgcattattagtccctcaaactatggaatctttgcatccacgcaaaatgtgcatatgggctaattaagtttaatttcttactttggaaagtataagttggaaacagaaagtcttttggcagttatctaaggctgggaaaatgtgtaggaatggagagtagttgggtacaatttatgtgggggataaattggaaatgattttaaattagaaatactactaatagttgtagagttctacaactataggaataagcactgagctgtatagctcaagtgtgtgagatactatgatgactctatttcaacaaagacgtttaaagcaatagagaacaactctagaagactatgattccacgtaagctaggtcttctttaaaccacccaggcacaggagttgtacagacaggagagcagactcaacagaaggtccaggtaactgtcttgttgcttcaagcttttccagacatatgagcaccaagacctctctatttttgaaggaactgtgtttcctaactctagtggagagtaaccaagacttcacttttgggagcttctgtgttcacatacaagtcactaaccaattttctaaaatgtgagcttttcagcagtcagtctctgagccaacaattacatctgatgaataaaagttacccttacattaacgaagggtagtttcattttctttgcaaccattctactgaaaattctattttaaaggtcataaataatgtctataaacactaaataacactctgtcaccaaaagaaagagatgcaactacacattgctttgtaatgtctttctctttcttgtgacggtgtcaatgaaaatggttgtataaagggagcaactttgccctcgtggttcttctagaatcagatttcactccaaatgactgctccagcattgtctatggcaaactaatagtctgtatggctgcaacttctagctgtcgtacctgtgttctagatggcttggggaaaggatggtcatttagaactcttctgtcccagacaaaatagaagtaaagacagttgtcaatccatctgtaaaattgccaaggtcaaacaaaaccacaaagaggcaggtcagctaagttgtcgtgtgtcttagttacctttctatttctgtgataaaacatatgatcatggcaacttattctaaaaaaaaaaaatgcttaactctggacttacagtttcagagggttagaatccaggatggcacagcaaatgtttgctggcaggaacagctgagagctcacatcttgatctgcacattggaagcagagagaaaactctaggaatggtgtgagtgttttgaaatctcaaagctccaatgacacacttcctccaaccaggccatacctcctaatcctttccaagtagttctaccaggtagggatcgagtattcaaacatagaagcccatggcaagcattctcattcatacttcaacattgtgtgtttgggtacgtgtagaagcatggtacatattttagcagtcatctatcagggtcaaccacaaatactgctttaaatacaatagacaatgttaacatttactttattcttgactttgaggtatttgctgctggttttcttggtctttttaaagtctgattgtctttcaaagaatgattttgaagccgtagtctttttttgttttaagaaagatactcgtttttctttttccttttttcttttaaataagtgaaggttggctctactgccctgtgtacaaggaaattcacagacactatttaaaaaaagtaagactagcacttgtccgtgaactacatactcatatattttaaattattcctggattaggtataatacccaatacctagtaacaagagagtatcatacatactcaatataaatgaaatttggtggctatgttgtaattgttatatttaattttattttggagataaggattgaaccaggacttcaatgagcatatcatacactcacatcactactgaggtaatgccacataaattacttgttttctcttaaaagacttttagttaattttcttctggttgctctgcaaatgtcagcttacaaatttcagtgactaaaacctttggaggcaacactatagataaggagacaaaggtacatactttctccaggtctatagagcgtgagtgacagaaccatgattcagtgttcctaaatattatccatttcctagggtgcagttacatgtctcttcaagatgtttctgttattctttacctctgcagtgttatatctttagttactagctaatcgattttttattcccttcaagttccatagaaagatcatcttactgtgtcatatcctcccatatgcacatgagcacatgtttgtatgcatgtgtgtatatgtgtcttcagacaccgtgtccctacatactctcagtgatgcatatgtgtatatgtgtcttcagacacggtgtccttacatactctcagtgacatggagctcactgtgtagaccatactcaccttaaactctataggtccccctacttctgcctttcaagtgttggcattgaaggtttgagccactgcaccttactgtgtttttaatgtaaaagcaaggaatccaatattaccttgtcttaagttcactactaacaaagaagtagtgtgttgtgtagttttcatgactcatgagtgtatgtttgtgtgtaagtgtaaatggtaatgtaattggataatgaactcaccccaacaaatatttaccaaagcggtggtaaatatttgtaactactaaagaattgtcatgaaataaatattttttattaatttggggacactttattgtatctttttgagctgaacattcaaagcactaatgatttcatacagagtatggtctgtgtttggattccaattcaaacaaaccaacaacacaagacattttgtagaaaaacgggaaagctcaaacagactgagttataagctatatgcaaaaagtatttctacacatctattgtggtaatgatttgtaattatattttaaaggctttgataattataaataacagatgaatatttagaaataaatgcaatctatgtgacatttgcttttgaatattctagatagacataaaattttaggagaaaaatattaaatgaaaaaattcacagagacacatggtggcgctataggataagatgaaactgcatagccagccctgtgggctccagtatctaaaggaccagagaacagacgattccatgagaagagaggtattacaggagcttcaccggcagagctgccaagggactttcaatagaaatatcggacctttacctgtaaaatttgggactgggtttaaattttggagtaaaagaagtcacctgaaggaaccatgggaaggagaagggctctcatcctgcagaaaaggcaagtcttggttttctttgttttcctgggattgtctcaggcgagtgctgaatctttgcgctattctgtagcagaggaaacagaaattggctcttttgtggctaatctggcaaaggatttaggactgggggttgcggagctgtcctccagggaggccagggtagtgtcagatgataataaaaagcatttactccttaatttgctgactggagatatgctcctgaatgagcgactggatcgtgaagagctatgtggctccacccagccctgtgtgctgccctttcaggtggtactggaaaaccccttacagttctatcgagctgagctgcacgtcagagatataaatgatcactcccctacattcctagacaaggaaataactattaaaatatcagaaagcactactatcggagccacattcttaattgagaatgcacaagatctggacataggaagcaacagtcttcaggactacagcattagccccagttcttatttctatgttaaaattcatgacagtggcgatggaaagatatacccggagctggttctggacaaagctttagatcatgaggaggaatctgagcttagattgacacttacagcattagatggtgggtctccacccaggtctgggacaacactgattgtcataaaagtcttggacatcaacgataatgctccagagttcgctcagagtttctatgaggtgcaggtcccagaggacatgcctattggctccagtattactgccatctctgctaaagatttagatatgggaatttatgggaaaatttcatattcatttttgcatgcatcagaagatattagaaaaacctttgaaatcaacccaacatctggggaagtcaatttgagatcactaatggattttgaagtaatacagtcctattctgtaaatatccaagcaacagatggtggaggtctttctgcaaaatgcactctttcggttaaagtattagatataaatgacaatgcaccagaagtgatcatgtcgtcggttacaaaggcaattccagaaaatgcttcagagaccctggtcgctctattcagtgtccgagatcaagactctggagacaacggaaggatcctttgctctattcaggatgaccttccatttattctgaaaccaagcttcaagaattttttcactctactttctgaaaaagcactagacagagaaaggagagctgagtacaacatcaccatcactgcctccgacatgggcacacccaggctcacaacccagcacaccataagagtacaggtatctgacatcaatgacaatgccccggccttcacccaaacctcctacaccatgttcatctacgagaacaacagccctgccctgcacataggcaccatcagtgccacagacaaagactcaggctccaatgcccacatcacctactcgctgctaccggctcaggacccagagctggccctcgcctcgctcatctccattaacgctgacaacgggcagctatttgcgctcagggcgctggactatgaggtcctgcaggccttcgagttccaagtgggtgcgacagaccgaggctcgcccgcactcagcagccagactctggtgcgcgtggtagtgctggacgacaatgacaatgcgcccttcgtgctctacccgatgcagaacgcctctgcgccttgcactgagctgctgcccagggtggcagaacctggctacctggtcaccaaagtagtggctgtggatcgcgactctggccagaatgcctggctgtcgttccagctgctcaaggctacagagccagggctgttcagcgtgtgggcgcacaatggcgaggtacgcactaccaggctgctgagcgagcgcgatgtgcccaagcacaggctggtactgctagtcaaggacaatggcgatcctccgcgctctgccagcgtcacgctgcacgtgctagtggtggatggcttctctcagccctacctgcctctgccagaggtggcgcgcgaccctgcacaagaagaagatgtactaacactctacctggtcatagccttggcatctgtgtcttctctcttcctcttgtctgtgctgctgtttgtgggggtgaggctgtgcaggagggccagggctgcctctctgggtggctgctctgtgcctgagggacactttcctggccatctggtggacgttactggcactggaaccctgtcccagaactaccaatatgaggtgtgtttcacaggaggtactggaacgaatgagttcaaattccttaggccggtcatgcccagtcttcagctccatgaccctgattctaatatgctggaaaaggagaactttcgcaatagccttggttttaatattcaataaaattttcctttaaacttaatattttctattaacaaattgcaaatgcttgttttacttaatctgtattgaatttaaggttttactgatgatgcatgcatttttgtttcacgtgtttttctcacaattactttgaaaatctttactgggtttatagtgatgcaaagaaactatctgcacgttttgttttgtttattttgccgaggtgttatgttaacggttctgctgtttcttatataagacacagcaatggaaatgctgatttaagtatttagagtcgatgtgttgagctgctgactaatataatactgggtggagtccataagcaggcagccccggatggatctacaacaaaagacatggagggagggaaggaaggaaataaaaagggacaagtgttatcatatatgggagtttccccagcatgctactaacagagagtctaaatgttgttgtacctgggtagaaactgtactggatcatttgtagtattctctgttagattatttgatcagaaaaaaaaatactatttaaatgcttcccttccatattcagtagaagaagcctttgttttataatgttttcaagaattaatttcttagtaagttttccttctctgttttctaatgatgctttctaactattaaaatattctaggtcatgatattgctgctttgttgtctttaaatccacatgttttcttgactaaaatttgtggtactctataccacttattgctaaagcagataatcttgtcttaagtaaaatagtcttgtaccagaaaacaacaggataaaaccttactaggatttaaaataaagataaagatttttaaatttaattttattcacacattgattgattgactgactgattgtttttatgtgtagccctggctttcctagaattaactctgttgattcacaaagatccagctgcctctccctccccagtactatgatttgcccatctacccaccatcaccagtaaaataagtatttttaaatgatttattttttattttatgtgcattggtgttttgtgcccatgtatgtctgggtgagggtgtcaggtcccctagaactgaagttacagacagttgtgagctgccatgtgcctgctggttattgaactcaggtcctctggaagaatggccagtgctccgaactcataagccatctcttaggcccctgaaataaagtttctaaactgttaaaaatggcttagacttaccttttataatcattaataaaaggaaatattatctaagtgtggaagcacaaatgtgtaaccccagaagtcaggcaactggtgaaagagaaccattaatttaaggttggcctggactacatagtaagtgttttccttaaaaagaaatagagaagaaaacagaacttcatatgctggcatattttcagaatctaagcacatgagagactggagtgtgaagccagcctgactctctaagacacggtctcaaagactaaagagaagcagagtagtgaattaggatgaaaaccctgatgcttgagacagtgaggcaacagaaccatcgtaatatacaggacagcattcattgctgtgaattcaagaccagcctatgctacggactaagactctgtttcaaaaggacccaatagatattaaaaataaggatgaaaggcacaaatatcttgtctagttgtgtagacctagcaggtaggcacaaggccttggcttcacagttccaaggaataatatgggaatctgtgtacactgaggactttgaatgcccaaagttcaatttttttaccatgcaaaaaagtgcaagtaatattataaaatattaataacactttccaggctctcaaagaataaagaatacagatctattctttgtggctatttgaatttatgattgataaatgactaattatattacaaattataaagtctccaatctgtaggtgaatagtttagtggaggattgtattaacagcagatatattaatagcagtgtggatatagaactaggacacagatacatttttgtaattcctgttaaaattaaatgtaatttatactggcctctactttcactggaagcaatttgctattaagaaagctcatatttaatgttgaaatggatattacaatgtaatacagtgtatttttatgggaccatttagaatcttggaaaagttaaaccctcacgttaatgatttatatgctggggatcaaacactaacagatacatttacagaagaatttcccatgaattaacttggagagtaaactagaaatacatcagaccttgtgccaaatttcagccttgaacttgctttccagccttaagcttaatcagctatcactgacaggcattaatcgtgggtccatcctgagaaaatcaaatgcaggcttttataaaataaattatgccctaaagatagacgacatacacaatttgctttgcattattaatattcctgacaactgcatacccagggagcatgcagccatgaatgagagccaccaggaaacaaaatgatgctagcataacatggaagggtggtgggctggagagattggctcggacattaagagtgataattccatcccactccccatgcctggcagctcaactgtaactctaactccagacaaactgacaccctctgccaccacctgcactgacacatgtacatatacacacagagacacatcaacgttaacaagacatattagatacggacaaaattaagcttccatagtgaaaagcacattaatcaaaaaaattttaaattaattttttattgactcttgtgaatttcacattatgtaccccaatcctactcatctcactgtcactttgtatcttccctctgccttgacaacctcccctcaaaaaatgaaaaataaagtaaaaaataatttttaaaaatctcatcatagaagctgcagtgtttcacagaaacctctgatttctgctacactgtcaatactggatcctcactaggactcctcttggatatcatgttattgccctgtgccatgagactctgcagtttggatctgcacgacttgccccttttagagtttcagcagttcatagatggggtagatgttggggtgggccaactcaaagcactggacttgagcctgggtggtagctgagttggtcagcccaacaagctcaccacagtgccccagaactgccccagctagttcacctaaagccacaatcagcaagggatggggccaaccctcctgctcccttggcctgggactggctcacccaaaccttcaccaccagggccacctctactgtgttgcccgggctaagtgctggcctgatctccagagtactgcggcaggcaaggggcagggccaactcttctcatggaggctcacctgccttgctaccaccgggaccagctctactgtgctgtctgggtgaggtgtgagtgtctgctctagagtgctgtagccaatacaggggccaggacagctctgcacagccgttggacatcaacatgggcccatgcagcatcccagaccagagatgtctgcatggcttttggtggtaatatggaccacaaacatcaacacagatctctgctgctactgcatagcaatagacccaagattgactcttagtggcagcatcatgggtcaggacttcaccatgacctcaggtgacaaggcaggctccgcacatcaggctgttcctctccactctcaggtctccagtttcacctctcttcatagtgctcgaaccattctgattctctttctctcccctctctctactacacatttgcatgtaattgtagtggctgagggttggtgggcctctgggtatcttctgcccacccacactgtgtggtggccccaaaatcaagtttttaaaacagaataggagacaataaaaatacttagacatattaaagatattctaatacaattcatacattatgaaactcaggaggttaatatcaaaatacaagaggagatggttaaaaacacaggactgatttttttaaaaaaagattcaatatgcatccaaaaggagagatgagaatgttggtttggtttggtttgatttgatttggtttggtttggtttggtttggtttggtttggtttggtttggtttggtttggtttgcttgtggtttttggggttttgaagacagaaaggtttctctgtggatctctgtagatcaagctggcttcaaactcaaatatctgcctacttctgcctcctgagttctgggattaaatatgtgcaccaccactgctcaacaagagagatgagaaaattttaaccagaacaaaatttgaaaaaataaagactggaggatatccagaactgatgaaaacatcagctgataaatccaagaggttgttataaatctaaaagaatacactacagagatgttcctgttcacaaacatcctagagaaactttagaaacccaaaatcaaagagaaattttaatttaaaaattgcaggaaagagaaatttaacttcaacacatgacaattacactgtccaaactgatttgtgtttctcagtagaaacagtggaaaataagagaacttcggttttctaaaagaagtaagaaaagccttctatccagtttttgtatagtcatcaaagaagagaatcaaacaaacttggtatcatttttgtttcaaattaatagagatcacagagaagaaggggtaaaaatacattttctctttattggcccacaccttgccacagatatggatctaggagtttgactctgtgtttggcctgtaatgacattatctcttcctcttctgacaaaatgtcactgtggggcccaatatgggttcaaactggtcatggccatgcctcagcctctggagtgctgggattatgactccacattcatttctactctagaagagtcaacccatgaccatagagatgatagtctcttctggttgtgtactctctcctttcttccttgcccctttgcacactctcttcccatgacaggaccttccagaaatgagtacaagtgaaaagaaaaggcccttgttcatgcaagagaagtactccaccgctgagctacatccccagaaaacacaatttcaaacatccttaagttgtgttttatgatttttcttgaagggtctcaagacctcactttataccatcaaatcctaacatttatcactggggttcacctatttccccagtttatttatataatggaagatcagatgtgtaactataggcatgctctgtggtccctttaaactcttaaataccctagatgtgctttaagttaaaaattctccttcccaaaatctacaaatgtattccccctccagctgcatatattcctctttttcttctttctgtgtttacaaccattggttaatatctccagtatcatatagcttttaaatattgtaaacaaagtcatgttaccttattataataacatatgatttatctatcacttcaccctacactattccatagttttggtgcaaatccattactatatttttagttgaggctggtatcatctcctacatctattattacaaccagctattgccagtgtcctgttttatattattcctttctaatttattcttaacttggaaacacatccgaaaaaaataataaaactttgattatattacttttctgttcagaacactttaacagtcttacatttccaccgacattccaatttcaaccttcaccatttttttcttgtactatgtcattgccatgatcttattttatttcttttaaaacacacctctcgttttagatttgcacagtggtgttttgcctttccctgagagcagggattcacatgcactctctaccactgaactaatcctccaaccctcccataatttttgtttggattacttccacttattttacatgtatccgtttagaatatattctctccaggaaggccggttctccacttccaaagtttgattagctgatcctcaaggcagccatcgtgcttcgtgttaagggtccattctctttctccccttctcagggcaaaacagtttcttcgtggttatcattcaatccccaatgcttatggctattacttggtcaagtgtatgcttaataaacagttactaagaaaatcatggaatagataaatggtagactcatgctgttggaagccctgaatgtgcaaaatagtgaagttcagtttcacaattttatgttgtcagaatttggacatatcaaactttattttgtagcaagtatttctactgcagccaaggaagtctcttatgagtgttcctaagaaaatggtaccatttacctagaccaccaaacaactatttgcccataccagactcaacttcaagtgcataagcacaccctttctgccttttctgagagcacttgatgattccttgaagtgatatcttgcaattttcctaagaatctcttactgatttttgtaaaatcaatgacatgtgagttctttgaactatctttagttttacagttttctttaaggaagaatataaactgttggaaataaagattctactttaaacaattttatcaatgcagctctaccagacagtaatttattgtgataatcacaaaaactgcaacccagaaatggaaactggaataaagaagaagagataacttaggttaataaaaaatacatttgacaaattaatattttgtctcaaatttacttgactttgaaacccaatgacctgcatagtcacatggtggcgctgcaggacaggatgagagaatgtttctcaacagcagctcgggtttcttttaaccatcggaagcaaaggcactggataaaacagcactcgggctttctacaaaggtggggcacccacaagaccctccagaaaggattgcaaatctataaattcccaaaggtccagatgagcggaaccactctctgagctgccagagactgagtggaaacagcacaacagaaagcattttgtctaaggagtgatggagcctggagttggagctgctcagcatataaggcaagtgctgcttttctttgttttcctggaagggtcctcggttcttgccacgacctggagatattctgtgccagaagaaatggagactggctcctctatagccaatataattaaagatatggatgtgggtgatctggctgcacggggggccagagttatatttgatgactaccagccttatttgcggttagaactggagactggcaacttgcttttgaatgaaaaactggacagggaggcactttgttctagcagcgaaccctgtatattgcatttccaggtgctattggaaaatcctctgcaattttttcaggctgagcttttgattgaagacataaatgaccatacccccacgttcctagaaaaactcatatttctaaatatctcagaaagtgctactccaggaacctcattccaaatggatgatgctcaggacttagatatagggatgaatggtatccaaaactattcaataagccccaacccctatttctaccttaagttaaaagacagtggtaaaggaagaagatatccagagctggtactggttagatctctggacagagaaaaggaggcttcaattagcttgatactaacagctatggatggtgggtccctgcccaggtcagggactgtattggttcaagttgtggttctggatgtcaatgacaatgcccctgagtttgaaaggaccctgtatgaggtccaagtaccagagaacagttctgtggactcactggtaatcaaggtgtctgcgacagatttggattcgggaataaatggagaaatatcttattcgttttctcatatctctagagatgtacaaaaaacattcgaaatccacccaacctctggtgaagtccgtttgaaaagactcctagattttgaggtaattcagtcttatacaataaatattcaagccattgatggtggtggtctctctggaaaatcagccattattgtccaggttacagatgtgaatgacaacccaccagaaatagtcattacatctcttatgagctctatcccagagaacggtttgtcagagatggtggtcgctgttttcagtttacgagaccaagactctggagaaaatgggagaatgatgtgttcaattgaagacaaactcccttttctcttgaaacctactttcaaaaatttctacactctagtaacagagcatccactggacagagagagcagagctgagtacaacatcaccgtcatgatctccgacctgggcacacccaggctcacaacccagcacaccataacagtgcacatctctgacatcaacgacaacgcccctgccttcacccaaaccacctacaccatgttcgtccgggagaacaacagcccagccctgcacataggcaccatcagcgccacagactcagatttaggctccaatgcccacatcacctactcactgctgccaccccaagaccagcggctggccctcacctcgctaatctccatcaacgctgacaacgggcagttgtttgcgctaagggcgctggactatgaaaccctacaggccttcgagttccgcgtgggtgccacggaccgaggctcacccgcgctcagcagccaggcgctggtgcgcgtggtggtgctggacgacaatgacaatgcgcccttcgtgctctacccgatgcagaacgcttctgcgccctgcacagagctgctgcccagggcagcggagcccggctacctggtcaccaaggtggtggctgtggatcgcgactctggccagaatgcctggctgtcgttccagctactcaaggccacggagcctgggctgttcagcgtgtgggctcacaatggagaggtgcgcactaccagattgctgagcgagcgcgatgtgcccaagcacaggctgctgctgctagtcaaggacaatggcgatcctccgcgctctgccagcgtcacgctgcacctgttggtggtggatggcttctctcagccctacctacctctgccagaggttgcgcacgactctacccaagtggatgaggaagcgctcacactctatttggtcattgccttggcgtctgtgtcttcgctcttcctcttgtctgtgctactgttcgtgggggtgaggctgtgcaggagggccagggcggcctctctgagtggctactctgaacctgatggacacttctccggccacctggtggatgtcagcggtgcgggaaccctgtcccagagctatcagtatgaggtgtgtctgacaggaatgtcagattccaatgatattcggttcctaaagcctgtctcccaaccttgagcaggccgcgaaatgcgtgaaagaaaacacctcctctatgaatcagtttggatacaattagcaatttgttgactctcatcatggttcctgatgtacactggttctttttaaacattcttgttttctatcattttattttcatgagaaacatctaaagttttgcctttattttcctaattcagtagataactttcatttttatccttacaggttggtctcaaaaaaaaaaaaatcatttcctgatgaagacagagaatactcattactgacaaatcccagtttcttcaacttgttaaattctcaaaaattaatcattattgatttgaaaatcctcaccttcattctgttgttttgaagcattgatgttttgaagataaaggagatacaaatgtaatgaattatcagagtatcttctgtctaatctaatattatgctttcctatctagaatagttagagtgtctgaaaaatgcatggttttgttgtacagcagaattaatcagaaatttctctgaaatgtcaagacttttactgatttaatgaatgtccaacatgtaatacatataaatattgtttaaatatttttagattatctcaaaggttgtaaaaaaattagattgctcctatgacatctatctagcccacctcacattttctgaaaatgtctctcttcagcatagatatgggatcaaagctcagtttgttttgaacaactcaggtccctctatggtttcaaacaattggatcgagtgatgggcgttgctaatctaaactgaaccagtctggtcctggttacctttaaattcactttagaaaccagatgtattctagtctctctgttaggaacgttacaagaaagtgatgtcatctttcggtgtcctatcaaatgtcaaacctccgggagatgaaaggaaagacttagcaagcaagtaaccttgtggaggaccttcattttgacacgactttcactattgggttgggaactggggacagagaactaagacgtaataaatgcccttgtaataaatgctcctcatacagcttagtaaatgtttttttctaaaagcatgttttgatattcttgcctggattagtgaactatacctgttgattttacttttattgagtctttcgtgttaatagaacacaattaaaatgtttgcaaactattacagtagcatagaacggacgtgtgaagcttttgtctaaaaggaaaaatttgaagataggagtagtggtagtctcaggaggctgaggcaaggtcttgacaagccttagtatttttcctttgataaaaagacagtttagatcactccttgctgtctcagatgactattagaagaaagtagagaattgctactgaggaaaatcctgtcttgcttattcagcttattataaaataaattataatcccaacaaagcaaaaacatttataataggaaaaactcctcacatttttgtgttttatttgctgagaatcatctctgtcctaaatattattttgaatagtggggtgcagcagtaatgccagcaatgggtagtacttacaggttacacaaaggaaaaaacccaacatattcatttatgcttcatatgatgaaaaacacctgagagaaaaatatggggtaagaggtgctttcatataagcttttccatagttgaatagttgtatacaattttaagttgctgaccatatgtagaaagcatatcataatctagaagtaacatgttaagttttttttttctttatgaaacccaaccaactggaaccacaattttggtacctaagagacataaaattacaaagaaacaccagaagtattaatctcactttatgctggaagaattttaaggaatcacgtgactatatgttactaattttacaaagttactgatcaatcactattgtgtctttttctctctctcagtttcgcctaaagtgtctccagcttgtctgtgttgtttattcttgtgatttttagaatctagggtagtactaagaattattttttgttgaacgaaagactggataattaaaataatgttgtttagtgtttaaacttctgacaaccaaatagactgtaaaaagaatggaaccatgctgcaatctgttgaagagcatagtcaacgcatggtggcgctgcaggctaagactttaaaaatgaggaccgaaaaaaggaaattaaaaaaaaaaaaaaaagtgcttcttcagatcccaggcagagctcagacctttgagactccagagaatgctgctaatctacacttgggagcaggctattaactgacaggtcgaccactgtctggatacccttgtaccctgggtgcagaagcaaagatgaagattggaagggaacacagaaaaaggcaagttctgttgatctttctcttgctgggagtggttggggcgggctcggaaccccgccgctactttgtgatggaggaaacacccagtggcactgttttggcagatctagtccaggacctagggctgggagttgcggagctagctgctcgaggagcccaggtagtctctgaggaaaaggaatcccgcttgcagctggatctacagactgggaagctaatcttaaatgaaaaactggaccgcgaggagctgtgcggctccactgagccctgtgtcactcatttccaagtgttactgaaaaaaccactggaaatatttcaagctgagctacgagtaggagacattaatgatcattctcctgagtttcctgaaagagaaatggccgtgaaaatcatagagaatagccctgttggcactgcgtttctactcaaaacagctcaggatttggatgtgggaaataacagcgttcagaactataagattggtaccaattctcatttccatgtttccatccgcaaccgaggtgatggaagaaaatacccagagctggtgctggacaaggagctcgatcgcgaggtgcaggcagcgttcagattaactctgacagcgctagatggcggttctccgcccaggactggcacctcgcaaatccgcattgttgtcttggatgtcaatgacaatgcccctgagtttgcacaggctttctaccgggtgcaaattccagagaacagtccctcgggttccatggttgctaaggtctctgctaaggatttagacactgggacaaatggagaggtatcatactctctttttcacagttctcaggaaatgagcaaaacttttgagctaaacgccctgtcaggagaagttcgactaatcaaaacactggactttgagacaacaccttcatatgaactagacatagaggcaactgatggcgggggtctttctggaaaatgctctgtttctattcaggtggtggatgtcaacgataattacccagaactaattatatcatcgctcaccaatccaatcccagaaaattcaccagagacagaggtggctctgtttcggattcgagaccgagactctggagagaatggaaggacaatttgttccatccaggatggtgttccctttacactggaaccttccgttgagaacttctatagactggtgacagatggagctctggacagagagatcagagctgagtacaacattactatctccgtcaccgacctgggcatacccaagctcacaacccagcacaccataacagtgcaggtgtccgacatcaacgacaatgcccccgcctttacccaagtctcctacaccatgctcgtccacgagaacaacagcccagccctgcacataggcaccatcagcgccacagactcagactcaggctccaatgcccacatcacctactcgttgctgccggcccaggagccacagctggccctcaactcactcatctccatcaacgctgacaacgggcagctgttcgcgctcagggcgctggactacgaggccctgcaggccttcgagttccacgtgagtgccacagaccgaggctcaccagcgctcagcagccaggctctggtgcgcatagtggtgctggacgacaatgacaatgcgcccttcgtgctctacccgatgcagaatgcctctgcgccctgcacagagctgctgcccagggcggcagagcccggctacctggtcaccaaggtggtggctgtggatcgcgactctggccagaatgcctggctgtcgttccagctgctcaaggctacagagcccgggttgttcagcgtgtgggcgcacaatggtgaggtgcgcaccaccaggctgttgagtgagcgagatgtacccaagcacaggctgctgctggtggtcaaggacaatggagagcctccgcgctctgctagcgtcacactgcaggtgctaatggtggatggcttctctcagccctacctgcctctgccagaggtggtgcgcgaccccagtcaccaggaaggtgatgtgctcacgctgtacctggtcatagccttggcttctgtgtcttctctcttcctcttgtctgtgctgctgtttgtgggggtgaggctgtgcaggagggccagggaggtctctctgggtggctgctctgtgcctgagggacactttcctggccacctggtggatgtcagcggggcagggaccctgtctcagagctaccagtatgaggtgtgtcttacaggagattctcagagtaatgagttcaaattcttgaagcctgtgttttctggtattgtagaccaaaactatggtaggcaaccagatgatcagtccttctcaagtgttttaggtatgtgaaacgtcacatttcgctctctgtattcttctgtcgcttttgcttttgcatttttttttcaaatctggtagtaatgtttacttgtgtttgtttttccatttctctgctagtttacatagtattgctgttggtttattagcttgttaactgtttaagtatttttccaaatctattgttgctgaacattttacatcaggacacttcacgctcctgattgaatttgccatagtctgtcctaaagaacgtgtattttctgtaatgaataaaattctaattacaaaagtatatttcctgtcctaggggaatagattagtttatagagtgcttgtgtgtttgttagaggccttaggttggatccctccgtaaatccagcacttggaggtggaggcacgctatcagaattcaaggtcatcttctacatagagaatgcaagctaagcctgggctatgtgatgaacaaggtggattaagtctcaaaaattaaaaatataattctgttgtgtgttcccatagaagaacatatgatttcttttaaataatacgtcattttaaaatcggaagcccttagttttattatttgcatggctatgacttcagtagcctcatttgtcttttctttggaagcagttcatattcgttaatgtcaagtttcttccagattccctaattatgttttctattctccaacactgtaaatatcatctcatggaaaccagacccacatcattcactctctctcttataaattaatattgaaaggggtaaaattatcttcattgtctttagctgatgggagcccttggcatgatactgatgacattaagtcaatcagctccaggaagactgaaaagtggggtgtgtgtacgtgtgcgtgtgtgcgcgtatgtgcatgtgtgtgcatgcgtgtgtgtacgagtgtgtgtgtgcgtgtgtgtacgtgcgtgcgtgtgtgtgcgtgtgtgtacgtgtgtgtgcgtgtgtgtgcgtgtgtgtacgtgcgtgcatgcgtgtgtgcgtgcgtgcgtgcgtgcgtgtgtgtacgtgtgtgtgtacgtgcgtgcgtgtgtgtacgtgtgtgtgcgcgtgcgtgcgtgcgtgcatgtgcttgcgtgcgtgtgtgtatgtgcgtgcgtgtgcgtgtgtgcgtgcacgcttttacttgttatagtgggaaaatcctgatgtaaacctcaaattctgtcctcagggtagtttctggttgtacagaatgccatatgtaaatgctttgggtgatgatattgctgattgataagaaatttgcattatataggattaacattagttaactaaacaaattttagtaaggatgtgttgatgcagtattggatgatttggagaaaatattcagaaagattcccccaaagatgttcagtcctgatcactagaacctgggaatattactttatattgtagagataaaacatgaacgataaggttgttaataaggtaaacctaaaacagggtgtatattctagatcatttgggtgggtctgagagaaccagtgaaaagatttaaaagcaaagctgaatctacccagcgatgtagaagaataggcagagatagtggcacatgcctttagtcccacatttgggaggcagagacaagctgatctctgtgagttcaaggcgagctgctctacatagtaacttccaggacagctagagctacaaagtgagaccctgtcttgaagaaaaacatgagagagatgtgggggaggaaaaagaaattccctaaggactgtaagtgtatcttgtggctcagtgtttcgacctgacatattctgactgtcataccacaaggaagtgacttattccactttgggagtttactaaaaagttcaatatctgtgtttcctgatggctctctttctccagttgaagcctgaggatgcagctgatgaagacctaaaagatggaagtggagccaggcagtggtggtgcacccctttaatcccagcactcaggaggcagaggcaggcagatctttaagcttgaggccagcctggtctacagagggacttccagtacagccagggctacacagatacactccgttttggagagaagtatggacatgggtttttaattgggtgaaggtgcagagacagaaaaggttcaggttgctttgtatagacttggtagaaatgtgatcttagcaagtctgccagtaaagacacaagaggaagtgaggcgtgtggtgctcataaaacactttggcttatagaatttataatttaaaagaactatggggagaaatctggacattaaatttattactagtaagagcccaggcaaggaaaacactattaaaaactggagaaattttgcagaaaacttagctgaatcatgacttacattttatgagaaagaaaaaaaaaactcatgaatttgggcattggcagaggaaatttcccgaaaaactgccagaagtacaacttgatttcttctcactggttatagtaaaatatcagatgaaaaaaatacgctgtacccaggacctgatgcctggagggaaactctggatgtatcacagggcccccagtggagaagctagagaaagtacccaaggagctaaagggatctgcaatcctataggtggaacaacaatatgaactaaccagtaccacaccaccaccacccccggagctcgtgtctctagctgaatatgaatcaggagatggcctagtcggccatcagtggaaagagaggcccattggtcgtgcaaactttatatgactcagtacaggggaatgccaggaccaagaagtgggagtgggtgggtgggggagtggattttattagtgcatttttaatgaatttttctgcatgtataggtataatgtgatgctaattgcagtaattgtataacatactctgtgactgaaagaactttcagaagttggtcccatctttctgttctccactgtgcctgctaatgggttagaaagtagcaagtattattttctccaggctattgttattaacagccaatcagtaggagtagttcttgtcctttggaagcaatgatgacaaatttttaaataatgttgctttgaatagaaaacaagagaagtaagtttattactggtatatttagatttggactttctcttaatttgtctaaaaaaaatcatactcggatcaatcctataagccttctcatatgttgagttgttttgaagcaggcccagagattcaaatttgttaggtcagttcatccaggttcccattgtcttataagttatctggcagttgcttctccctctattttataaaggtttgtatgaggtatttgtgattgtttgaatgaaaattgtctcccataagctaatgtatttgagtacttagtccccagattctggatatgtttggggaggcagtaaaggtcggctggagaacgcaccttactgctggtgggcttcaagagttcatagcactactccacatccagcttcctctcttcccttggtgtttgggactgaagatgtgatctgtcagctgcttgctctgctgcctgctgctgtacctcaccaaccattgtatattctccctctggaaatgtaagcaaaaataaactctttcttccttcaggctcatttggtcatggcattttattgcagcaacagaagaataactaacaaaagtcttattattttttccttttatttttgtgggctttggtaaaattggccattaaaatcacccatgggtaaactttttttgtttgggaagactgcactacaaactcaatttgatatcccagaattccaattttctgttttctgttggtatcttgttttcttcatatgtgtgtgtgtgtgtgtgtgtgtgtgtgtgtgtgtgtgtgtgtgtgtgtataaactcaaaatttatgttagatgtggaatttttgaagggcattatttataatattaattttatcttgtaagctatttttatgttgtaagcaatacaatactctcctttttagtctagatattggtaatatgtgttttcttataagcattagtgtgagagtatcaacttcattattttttcaaaaaactaagtcagcattatccttgatacactgcctataactttctattttccattccattgaattctactattattttataatttctattatctcctttggatttaactttctgttttgctactttcttatttactgtataccttacttttaaaatttaaatcaaagcacatgaaatatgaataaacctgcatctttttctctatatgatacttaaaatgaagctaatgaagtttgatattttgtatttttatgaaaattctatttgaatttataattttcatcttctttgacaggtgtgctgtttagaagtttctagcttgatttcttttttgttttttgtttttgtttgtttccatttctttattatcagtagattcagacccaaaagtcaagatagcaaaaacaacaaaaactctacttggtcattaaacacaattctgcaaaagctgaagctgcaaagtatttgtatttcttcttttaaaaagttgtacttatttaaatggacattcattgtttgttctgtgttacctttgatatgaattacaaagatgggtaaatatgaatatttcttaactttaaagattcattaatttgtttggagtcaaaagttgattgcttttataattccaaaaatttataatccaatagagtgtaataattacatgtttaattctttttttatttccacaagttagcaatttatttgagttattatcctttttatcagatattgtatttatttacatttcagatgttatcccctttcctggtttcccctatgaaaaccccctatcccctccccctccctctgctcaccaacccacccactcctgctttctggccctggcattcccctatactggggcatagaaaattcaaagaagcaagggcctctcttcccattgataacacttctgggcatatacccagaagatgctccaacttgtaataaggacacatgctccactatgttcatagcagccttatttataacagtcagaacctgaaaagaacccagatgtccctctacagaggaatggatacagaaaatgtgtatacacagaatgtgtacagaaaatttacacaatggagtagaatacagctattaaaaacaatgaatttatggaattcttaggcatggatgtatctgaaggatatcatcctgagtgaggtaacccaatcataaaagaatacacatggtatacactcactgataaatggatattagcccagaagcccagaatacccaagatagaattctcaaatcacatgaaactcaagaagaatgaagaccaaagtgtggatacttcgatccttcttagaaggggaacaaaaaatccatggaagaagttacagagaaaaagtgtggaacagagactgaaggaatgaccatccagagactgccagggatctatcaaatataccaccaaactcagatactattgtggatgccaacaagagcatgctgacaggagcctgatattgctgtctcctgagaggctctgccagtgcctgacaaatacaaagttggatgctcgtagccatccattgaaaggagcacaaggtccccaatgaaggagctagctgaaggggttttcagccccataggaggaacaacaatatgaactagccagtgccctgagagctccctgggactaaaccaccaaccaaagaaaacacatggtgggactcatggctctagctgcatatgtaatagaggatggcctagtttgatttcgaagtgctttgaggatatgattttattgttcctcatgttttgattagagaatatatatatatatatatatatatatatatatatatattcccttgacacttactgaattcttttatttacagaacacagtgttctgaagtgtattggtaaaaattcccatgtccatttgaaaggagtatagtctttaattggtaaaagtgaagatttgtaaatattaactaattgttcaaagatgttttaaatattatttacgcattttcctatgtttaataatttactaacagaagtgtgttaatttcatcaaatattattgtgtatttatttgtatatttctttttttgagtatagcctttttaaactttattagcttttaagctgttatttgattcacacaggtaattttttaatgtgattacttgacatttgtccttgtaaaatgtgtatctttcactatctaggtgatttaggtatctcatagttctcttttttgagatatgatgataatttctttactaaattatataaaagtgagagcacaatgggcaaagctgtcaggctttctcaactgtggtcctacattggcctggtactatctgagaagaggatacctacggaagactgaagagaaaagcaagagatgagtgaggcaggagagaagacttgtgttcacagtgtgtgggaaaaaaggctgcacatgaaaaaaaatgttcagcatccttaatcatcagggaaatgcaaatcaaaacaaccctgagattccacctcataccagtcagaatggctaagatcaaaaattcaggtgacagcagatgctgacaaggatgtggagaaggaggaacactcctccattgttggtgggattgcaagcttgtacaaccactctggaaatcagtctggtggttcctcagaaaattggacatagtactaccagaggatcccgcaatacctctcctgggcatatatccagaagatgttccaactggtaggaaggacacatgctccactatgttcatagcaaccttatttataatagccagaagctggaaagaacccagatgtccctcaacagaggaatggatacagaaaatgtggtacatttacacaatggagtactactcagctattaaaaagaatgaatttatgaaattcctaggcaaatggatagacctggagggcatcatcctgagtgaggtaacccaatcacaaaagaactcacatgatatgtactcactgataagtggatattagcccagaaacttagaatacccaagatacaagatacaatttgtaaaacacatgaaactcaagaagaacgaagaccaaagtgtgaacactttgccccttcttagaattgggaacaaaacacccatggaaggagttacagagacaaagtttggagctgagatgaaaggatggaccatctagatactgccatacccggggatctatcccataatcagcctccaaacactgacaccattgcatacactagcaagattttgctgaaaggacccagatatagttgtctcttgggaggttatgccggggcctagcaaacacagaaatggatgctcacagtcatctattggatgtatcacagggcccccaatgtaggatctagagaaagtacccaaggagctaaaggggtctgcaaccctataggtggaacaacaatatgaactaaccagtgccccccccccgcagagcttgtgtctctagctgcatatgtatcagaagatggcctagtcagccatcattggaaagagaggcccattggtcttgcaaactttatatgcctcagtacaggggaatgccagggccaagaagtgggagtgggtaggtaagggagtgagggggagggtatggggaacttttgggatagcaatggaaatgaagaaaatacctaatttttaaaaagctaaactattttttcacacttgttttattattggtcttgataaataaatatttagaaaatcaaaaaagaaaaaaagaaaggctatttgaagtcccagacaaatgtaattacagggggagcaggaagggaacaaagaaggagagaaagtcaaatagaggcatcttggaagttcatatgtagtttgaataataaaaaagaaattagtggagctatccctggagacatagaattgttgatccagaaggaaagagggggtagtagctctggggcaagtccagagtaaggatccagagaaaggcatctgtattcatcttttcttactctaaatctagactctgaggggcctcccaccagtatcccattagcagaagctcattctgaagccccactgtcctagtttacttctctgctgctatgcttaagcacttgtgaatagcaacttgggaaaaaaagagtttattctagctactgggtcataacccaagatcgcgagacaacagggcaggaacctggcttgcttttcttttgcttgctcagctacttttcttatacaatctggactcactagtctagtcatgacaacacctcctgtttcatttaacaatgaagaaaatgtctaatagatgtatgctcgagccagttcaatggagagtcatctgaagggaaaacagaaaaacaaatagtgtggtgactggtgatctcggttagcagttgccaggtccttggatttctgccctggtgccaaccactccatcttgtagttcttataactatagtcagttttacattatacatcttttttctataatgttatattcaacatgcatttatagttaatgtaaatactctgtaaacaacagagttgggtgttgggggtgttccccatcattattagctgtcttaaaatttaaaaagccattcaatttatatgtactatacaattcttctatggctgtagatatttgattttgtattcaaacaatctgttttcagtcctttgtttataattttgtttcattttgctcatggatttttaatattttatttatacctccagtagccttcagctgtgatattttctctagaaagtgatcaaaataatcattttttgttctaagtccttcgtgatcagggaaatgaaaatcaaaacgactctgagattccaccttacacctatcagaatggctaagatcaaaacctcaggagacagcacatgttggtgaggatgtgaaggaagagaaacactcctccgttgctggtgggattgcaaactggtataaccactttggaaatcaatatggagattcctcagaaaattggaaatatatctacctgaatatccatctataccattcttggaaatatacccaaaagataccccaccatgccacaggagcacatgttccactgtgttcatagctgccttgttaatgatagccagaagctggaaacaacccaaatgttccacaacagaataatgtatacagaaaatgtggttcatttacacaacataatactactcggctattacaaatgaggatattctgagttttgtaggcaaatggatggaactagaaaatattatcctgaatgaggtaactcaggcacaaaaggacatgcatggtgtatactcaccaataagtggatattagcaagaagaaaaaagtacagaataccaaggataccatccacagaactcaaaaagtttaacaagctgaaaagccaaagggaggatgcctcaatctgacttgagagggagaagaaagcaatcacaagaggcaggagggaaggagggacctgtgtgggaaaggagacagggactagaagaggaaaacatgacttgatattaggtgtgggaaaagggctgaagctctgagggacagcagagaggatgaaaacagatagccttgagtgggaggagatgggggaacctctagaatgtaccagagacttgggaggtgggagactctcaggactcaaagggagggactttagatgaaatatccaacagtagagacaggaaacttgtagagcccacctccagcaagaagacagggcatcaagtggagggatggggctgccatcccacagtcaaaactctgacccataattgttcctatctgaaagaactgcagggacaaaaatggagaagagcctgaggaaaaggaggtccagtgacaggcccaaattaggatacagctcaaagggaggccccaagacctgacactattagtgaagctatggtgtactcacaaaaaggggcctatcatgactgccctccaaaagacccaacaagcagttgaaaaagtcagatgttgatatttgcacccaaccagtggacagaagctgctgacccctgtagctgaattagagaaaagctggaagaagctgagaaggaaggtgaacctgtaggatgaccagcagtctcaactaacttggacccctgagatctctcagacactgaaccaccaaccaagcaacatataccagctaatatgaggaccccaacacacatagagcagagcacaactgggtctgggttcagtcagagaagatgcacctaaccctcaagatactggaggccccagagggtggagaggtctagttgggtgggggtgggggtggggacatcctcatggaaacaggggttgagggaagaggtatggatggggaaaagtcagagggtggactgggagggggataaaatctggagtgtaagaaaaagattaaataaaattttaataataataataataataaatggtcatttcttatcataatctaccttaagtggacattagactagctcctataaaatacaaaatagttataatatttgattctcatatattttgctatggcacaaaatatcagagacgtatttgagaattcatatggtactctgcaaatataatcaaattagaaaattctcaaaaaggcctttatatctaccatatacagtatattttaactgtaaggaaataaaatatattgaagaacaaaaataggctttaaaccaaacttcaaatcaaaattttcactagagaactcatactgtaaagaaatagtagaaaagcactcaatgtgagaactcatttattgagttctcagttaagacatataagggataacacactggacataaaccacattaatatgagatatatagggaacatttcaaatttgccttgaaccttaggagtcttgtaaagcacacattggacacaaattctacgagaatacaaaatgtagaaagcctcaattcttcatcaacatgcaacaactacagtgaggaaaattctcatgaatataagaatagttgatatttgctccaactattttgatgccaattaaactctggatgtaaaatttgtgagaaaacctttatttgttaaatatttaaggcattcttaggtgagaactcatattgaatttcaaacatgaatataatacaatatgagaaagttgttcttttctatattttgaatgtgcatgtaggaattgtcattgaggagaagacttgtggatataaaatcttcacttaatctttaaaatttacatgacaaataagaaaaataaaagagttctacagttataaagaaatgtaggatctggctttccattcataactatatgtatacaaaatgtatgatttgaacagtaataaatcttccaactattctttatattttactaggaattgtatattatatattttaatgtattcaatgaagagaacccatatataatggttaacttctaagtcaactgactgaaataagggatatataaagacataataaagcattatttctggatgtctgtgtttgtgaaaaagatgagaatttgaaccaccaatccagatagtgtagattcactctcactcaagaaaaactggtaccagctgccttctgcatctagagcaacaactttctcttgcctctgaatagcaaatctctagcttttggacttaaagagctaaaagagccagctcatattagctggttttctagattctatgtagtatattgtgggacttctcaacatccataatcatgagaaataaattctacttctcctatatcttcttctctcttttatttaaatgtatttcttgcctgtttgtatgtgcctacatgtttttgcttgcatttttatatttctgtgcaccatattcagtgcttggtgctcacagagaccaaatgagggaatcagatctcatggaactgaaattacatatggttgtaagctgccatgtgggtgctgggcatagaacccagatcctctggaagagaacacagtgcacctaaccattaatcaatcagtcttcccaaaccctcactctgcttcttgatagtgaggaataacctgaagaaacctgaaaaaagtattcagttgcttctcctccctaatgaaatacaagaactcacactaaacaaaaatgattttaatataaggaaagttcatataaatgtgtgtgtgtgtgtgtgtgtgtgtgtgtgtgtgtgtgtacaaatactgacgagaactcatacaaacatgaaatttaagtagacttctaaatatttctcattctttagccagagagtaagaaccaatagttaaatacctgtcaagattgtaggaaatattttagtttttcttctttcacagatgtatcaaaagtcacactaagaagaaacacaataactattatcaaagtggtaaaacctttaagtgcatttcttcttgtatgacaaaagaagaaaatttattttagaagagaaatctttaaagtccaagtatacaagtactaggaaaagaacatttcaggatcattttctatatatttactacacaagtcttgaaactaagatacacgttctgggaattactgaagatatgagtaataattctgctataagaaattgggaaatggtccagcactgtgtcccaaatcacagattaagtggagatcccggctgggtcagaagtcaggtaagtcacatgctcacagacctctaccaataacttgctgacttcccaccttattcccattcctccctccattcctcacggctgagtcccagctcccaacttgtttagagtccctgtgcttgactacaggtcattcctatctgcagaactccaggcaggccacctcttcatagacaatcctcactctatcagtagcccccaacaccactcctcattgccatgttccagaccccagtagaggcacagaccccagctaaaccagaggtcatgatggccaccccatctttggtggagaccctccactcaaccacaggtcactccaggtaggagacagggatgaaacagaaaccaaggaataaaacaaaaatccaacaaaaataaattccaaaattggcacatagatctataatcacctcaaacacagatgcctatatgtgactataaaaagtcagaaacaatggaaaccctgcaaactcatagaaactgaatacctctctactgaatgataactggatcaagaaagaaataaagaaacaagtcaaggactttgtagaattcacaaaagtgaatacttaacatacccaaacttatggaacagaatgaaagcaatacagagaggaaatttcatagcaataagtacttacacacaaaaaaataaatctgatactagcaacttaacagcacatctgaaaactctggacaaaaagaagttagcacactcaagaggagtagacagcaggaaacaaactgagtgctgaaattaataaaatggaagcaaagaaaacagtacaaagaatcaataaacaaagacttggttctttaagaaaatcaacaagagacaaaccgttatccaaactaagtaaaagacagagacagaatatcaaaattaacactatcagaaacaaaaagggggacataacagacactaaggaaatccaaacaatcattgggtcatactttaaaaatccatactccaaaaaattgaaaaatctaaaaaaaaaagtacaatttccacaatagatagtatttaccaaagttaaatcaatatcagatgaacaatttagataggggtataatccctgaagaaatagaagcagtcgataaaaatctcacaacatacaaatgccaaaggccagataggtttagcacagaattctaccagactttcaaagaagggtgacaccaatactcttagtctttgttgagcttttatggctatgaagagataccatgacccaggcaactcttatattggggcaacatttcattgggatggcttacaatatcagaagttcagtccattatcatcatggcaggaagcatggcagcatccaggcagacatggtgctggagaaggatctgagagttcttcatcttgatccagctgcagtcaggagaggactgtctcccaggcagatagtacgagggtctcaaatcccactctcacaatgacatacttttatcaaaaagaccatacctactcaaaaaaggccacacctcctagtagtgccacactgagagacaagcatattcaaaccaccacatgggatggatccacaggtggggcagtctctggatggcctttctttcagtctctgctccacacttgtctctatatctcctcccatgggtattttgttcccccttctaagaaggaccaaactatccacactttggtgttcattctttgtgaacttcatgtgttctgtgaattttatcttggatattctgagcttctgggctaatattcacttatcagtgagtgcataccatgtgtgctcttttgttattgggttacctcactcaggatgatattttctagttccaaccatttgcctgatattttcatgaagtcattgtttttatagctgagtagtactccattgtgtaaatgtaccacattttctgtatccattcctctgtggagggacatctgcattgtttctagatactagctattataaataaggctgctatgaacatagtggagcatgtgtccttgttatactttggaacatcttctgaatatatgcctacgagtggtatagctgggttcaggtaatactaagcccaattttctgaggaattgccaaactgatttccagaatggttgtgctagcttgcaatcccaccaacaattaggagtgttcctctttccccacatcctcaccagcatctgctgtcacctgaggacagcagatcttagccattttgatcttagccattctgactggtgtgaggtggaatctcagggttgttttgatttgcatctccctgatgactaaagatgttgaatatttctataagtgtttctcagccattcagtatttctaagttgaaaattctttgtttagctctataccccaatttaatagggttatttggttctctggagtctaacttcttgagttccttgtatatattgaatattagccctctatcagatgtagggttgataaagatgttttgcaaatctgttggttgccgttttgtcctattgatagtgtcttttgccttacagaagctttgcaattttattagatcccatttgtcaattcttgatcttagaacataagtgttctgttcaggaaaatttcccatgtgctccaggatcttccacacttttttttccattagtttcagtgtatctggatttgtggatgaccttgatctacttggacttgagctttatacaagaagagaagaatggattgatttgcattcttctacaggctaatggccagttgaaccagcacaattttttgaaaatgctgtctgtttttcactgaatggttttagctcctttgtcaaagatcaagtgaacataggtatgtgggttcatctctgggtcttcagttctattccattgatctacctgcctgtcactgtaccaataccatgctgatcttttatcatgattgctctgtagtacagcttgaggtcagggtgattccagaaggagttcttttattgttgagaatagttttcactatcctgggttttctgttattccagatgaatttgcaaattgttctttctatctctgtgaagaactgagttggaattttgatggggattgcattgaattcatagattgcttttgttaagatggccatttttactatgttaatcctacaatccatgagcatgggaaatctttccatcttctgagatcttcattgatttctttcttcagagacttaaaggtcttgtcatacaaatctttcacttgcttggttagagtcacaccaaggtattttatattatttgtgactattgtgaagggtgttgtttccctaattactttctcagtttgtttgtcctttgagtcaaggaaggccatagatttgtttgagttaattttatttccagcctcattgctgaagttgtttatcagttataggagttctcgggtagaattttgggagtcacttaagtatactattatatcatctgcaaatagtgatatattgacttcttcctttccaatttgtatccctttgacctccttttgttgtctaattgctctagctaggagttcaagtactatactgaatagatagggaaagagtgggcagccttgtctagtccctgattttagtgggattgcttcaagtttctctccatttagtttgatgttggctactgctttgctatacattgcttttactatgtttaggtatgggcctgaattcctgatctttcagggggtactcttaagagccagaagagcatgaacagatgttctataaactctaaccacatatcttataacagactattatacccagcaaaatttcaactaccattgatggagaaaacagggtatttcatgaccaaatcaaatttaaacaatatctttccactaacccatcccaacaggggatactagaaggaaattccaacctaaagaggttaagtacatacaggaaagcaaaacagggaataaatagtcttagacaggcaaagtcaaaataagggaagcatgtataaacaccaccactatcaacaacaacaaatggttacaaaaattaataattcttggttggtctttcagcactgataatctcaattccccaataagaagtgggatcagggcctgtctctgatatagactaacacatggatgtaaaaacaggatccatccttctgttgcatttttaaaacacaacttaacatcaaggacagacatcacctcagggtaatggtgataaagagatattccaaccaaatggaactaagaaacaaattggtgtgtcaatttgaatatctgacaaaatatatttcaaaccaaagcagaagagatctgcaaggaaaaatgtgtcaatttttttaaaaatccatcaagaggacatttcaattcttaacatcttgctccaaacacaaggcacctaagtttggaaaaaaacactacttcagattaaatcacatactaatattcacacactgaagtgggaggcttcaatatccaacacttgtaaatagatcattcaggaaaaaaagaaaaacaaaaagaggaggaggaaaacgaggattaaaaaaagaaaaagaaaagctaaacacaaaaataattgttaactgatgttaagaaaccactacagaagccaggcggtggtggtgccttaatcccagcacttgggaggcagaggcaggtggatttctgagttgcaggacagccaggacagccagggctattcagagaaaccctgtctcgaaaagcaaaccaaaaaaaaaaaaaaagaatgaaaagcaaccactacagatcaaagctgaatattaaaaccaatagaagcaacagtcctaatagatatttacagaatacatcacatagatgaaaaagaataaacgttctcagtaccttatggaactttctcaaatactgatcacgtgctcagacacaaagcaagtctcaacaaatacaaaaacatggaaatcaccctgcatcctgtctgaccactaagggggttcctataggtgtcatatagagaagcagaccccatgaagagatgagaatcaaaactgtgtctagaatgaattcaaccacctggatcatattttgaagagtctagtgccaggcagttcactttcagcgtatttaaaacagcacaacttggaaaaatgctttctaggcaacatcagtccaattaaagatgcataataaaacataagttgtgactacacagaaactcctttacaaagtacatatgaccatgaaggagggttctttagctaaaaggcttagaatctagtgtagtctctgaccaagatagcatacaaggcagcaggctttaaattgcttgtgacagctcctctaaggatatttaatggtctctggaaggaagaatttggggtaaacattccagaaaatttaatgagctcttcctctatagaaaaagtagggtgaggattgcctccacaattagcaaaatgtcactgggtcattaataaaatccattcttaaccttctgggtaggaaaatgggtatttttctcctccgttgagaagtccctgtgtgtttaacatttctagtttcccaagtgattgggaacaaggacctttgtgtatctacaaacaaccacaaaccaaagctggatatcaacaccaacagaaacaacagaaatcttacaaacccaatggaaactaaacaactcacttcaattaaaaaaaataactcatgacagaaattaagaaaaaaatcaaagattctctggaaatgcataaaaataaaaacacaacatacccaaacttatgaaacataatgaaggctgtcctaagaagaaagtctatggaagtaagtggcctatataaaaattggagagaactcatattagcaactgaatagcacacctgaaagatctgtaacaaaaagaaaagatcatgcccaaaaagagcagatggcaagaaataaactcagggctgaaataaataaaatagaaacaaataacatgaagaaataatgacacaaaaaggtggttcttcaagaaaattaataaaattgacaaagtcttgttgaaattaactaatggagagagagggacaatccaaattaacaaaaatagaaagaaaggagggacaaaacaacagacatagaggaaatccattgaattgcaaagacatactttaaaaacctaaactccacattaatacatccaacatcaaaataacaggaaataacaatcattggtcattactatttttcaacatcaatggactcagttccccaatttaaaaacacacacacacaggctaacagaatggatgtgaaaacaggatccatcattctgctgcataaaagaaacttgcgcccttccgctccactcgagccccgagctaccttgccagcagagtcgcctgacacaatttgctaaacacatgaaactcaagaagaatgaagactgaagtgtggacactatgcccctccttagaattgggaacaaaacacccatggaaggagttacaaagacaaagtttggagctgagatgaaaggatggaccatgtagagactgccatatccagggatccaccccataatcagcatccaaacgctgacaccatatactagcaagattttgctgaaaggacccagatgtagctgtctcttgtgagactaggctggtgcctagcaaacacagaagtggatgctcacagtcagctaatggatggatcacagggctcccaatggaggagctagagaaagtacccaaggagctaaagggatctgcaaccctataggtggaacaacattatgaactaaccagtaccccggagctcttgactctagctgcatatgtatcaaaagatggcctagtcggccatcactggaaagagaggcccattggacatgcaaactttatatgccccagtacaggggaacgccagggccaaaaagggggagtgggtgggtaggggagtgggggtgggtgggtatgggggacttttggtatagcattggaaatgtaaatgagctaaatacctaataaaaaaatggaaaaaaaagaatggcaagtcgtacacagtggggaaaattttatatatatatatatatgacatatatattatatgtaaaagtacatgtataagtccagtttcttataactgaaattttagaaatgaaactataagtaatgagggaaggaatgcctataaaataacaataaaaagaaatgcaatacagaaggggttaaattcaacctaacagtctgtactattttgtttttccaaattaatgtcatcatggtttgacatgttcagaaattttaatttatttctatcaatcaattcattatattaaaagctttatattgcaagtatgattgtataatttataggaaaactttagcatttctatttttcttcaattgacattgtacttattgtttcaaataaccaaattgtagaagaatttgttctatttaattaatatagagattgtcatacattttcctcagagttaagttcaaaattccaagtaaataaaataataatgaaaaataaaaaaaaaaaaagaaacttgcctcagccataaagacagacattacctcagataaaagactggaaaaaaagttttccaagtaaacagacccaagaagcaagtgggagtagtcatcttaatatctaataaaatagactttcaaccaaaagtaatcaaaagagacaggaaaggacacttcatactcatgaaaggtaaaaatttatggagatgatatctcaattctgaacatctctctcccaaacacaaaggaacccacatttgtaaaagaaacattgctaaagcttgaattgcacattgaaccacacacattaatagtgggacatttcaacaccccactatcaccaattgacagaacatccaagcaaaaattaaacagaggattagtgaaactcacagatcacccttcccctcccccttactgccgtgcatttggtgttttgattagtatgtgatatgaggaatttcttttctggtccagtctacttggagttctgtaggcttcttgtatgtttatgggcatctctttctttaggttagggaagttttctttagttatagaaattttcttctataattttgttgaagatatttactggccctttaagatgggaatcttcactctcttctatacctattatccttaggtttgattttcttattgtgttcttggtttcctggatgctttgggctaggagatttttgcattttctttgactgttgtgtcaatgttttctatggtatcttctgtgcctgagattctctcttctatctcttgtattctgttagtgatgcttgcatctatgactcatgatctctttcctaggttatctttctccagggatgtatttttctttattgtttagatttccacttttagatcttgaatggttttgttcatttcctttgcctgatggattgtgtttttgtgtacttttaaaaggaatttttgtatttcctctttaaggacttttacctatttacctgtgttctccagtatttctttagtggagttatttatgtacttcttaaagtcctctatcatcataatgaggtgtaattttaaatcagagtattgcctttctggtgtgttgggatatccagggcttcctgaggtaggagaactgggttctgatgatgccaagtagccttggtttctgttccttatgttcttgcccttgcctcttgccatctgattatttctagtgctacctgctcttactgtctctgactggatactgtctttcctgtgatcctggttgtgccagatcctcagagttcagctgttcctgtgatcctgtgatcatgagaacctgggtgtgtcagagcttctgggagtcaagttgtctctgggaccctgagatcctggtgtgaccatgctcctggtatcctgggcatgttagagtgcctgatagtggagcttcctctgggtgttgtaggactgtctgaggagttcgttcccaaggtctgctcagtacactggcccagactgaaaggaacccatgcccctggtcatgtggagttcctgggtgcctgggttccactagtcccagttacttcctgtgttgtggcagatgttgtttcctcctcacctctagtcctatgatcctgggtgtgttagagcacctgggagtggagcttcctctgggtgttgtgggactggctgtggaattcctgcccaaggtctcctcatgacaccagcctggaccagaaagaaccagtgccactggttaggcggagttcctgggtgcctgagtcccacaagttccagttgcctcactggtccttaatatctcttaacagcaatgggttcaattcctcaataaaagacatagactcacagactggatatgtaaataggacccagtcttttgctgcatacaggaaatgtacttcagacaaagagagacactacctcagaataaaaggctggaaaacaattttccaagcagatgttcccaagaaacaagttgtagtagctattctaacactgagtaaaattgactttcaatcaaaagttatcaaaaaaaagatgaggaaggacacttcatactcatcaaataaaaaaatctaccaagaagaactctcaattctgaaaatctatgctccaaatgcaaaggcacccatattcataaaagaaatttactaaagcgcaaagcacatattgcacctcacacaataatagtgggaaactccaacaccccacagcaatggacagatcatggaaacagaaactaaatagacacaatgaaagtaacagaggttatgaacccaatggatttaacagatatctatcagccatttcccctaaaacaaaagaatataccttcttagcatctcatggtgccttttccaaaaataaccatataatcagtctcaaaatcagcctcaaaatatacaagaacattgaaataatcccatgaaccctatcagattaccatacactaaggctgatcttcaacaataacattagcaacagaaatcccattatacaaagaatcaacaaaaaagaactttggggccaattaagtatactatcatgagccccttccggtccgagcagcaccaggtaactagagtgcacagtcgtctgactaccgccagctacccacaacacctgccaagcaatcttaagacttctggtgagtggaacacagcatctgctccaatccaatctcgcgggacttgagactgcattagtcagggaagcaaaaacctggtctgagtaggggaacaagccccttccagtccgagcagcaccggggtagctagggtgcagagttggctgactaccaccagatagccacaacaccagccacgcgatcataagaattctgaggattgggatctgcccggcgcgggagcgctttgcctgagcatcagcagcagacatctcggttccgggaccctgccaagtgtatcctgcacagacagctggccattttcccggccagaggatagggatctgcccggcgtgggagcattttgcctgagcatcagcagcacacatcttggttccaggatcccgcctactgtatcctatacaggcaggtgaccattttcccggccagaggatagggacctgcctggagcaggaacactttgtctaagcattggcagcagacatcttagttccgggaccctgccgagtgtaccctgcacagacatcttagttccaggaccccgccgagtgtattctgcacacctccagagaataccagatggcgaaaggcaaacataagaatcctactaacagaaatcaagaccactcaccatcatcagaacccagcactctcacgtcacctagtcctgggcaccccaacacaaccaaaaagctaggcccggatttaaaagcatatctcatgatgatggtagaggacatcaagaagaactttaataactcacttaaagaaatacaggagaacactgctaaagagttacaagtccttaaagaaaagcaggaaaacacaacctacaggtagaagtccttatagaaaaaaaggaaaacacatccaaacaggtgatggaaatgaacaaaaccatactagacctaaaaagggaagtagacacaataaagaaaacccaaagtgaggcaacgctggagatagaaaccctaggaaagaaatctggaaccatagacgcgacatcagcaacagaatacaagaaatggaagagagaaaatcaggtgcagaagattccatagagaacatcggcataacaatcaaagataatacaaaacacaaaaagatcctacctcaaaacatccaggaaatccaggacacaatgagaagaccaaacctacggataataggagttgatgagaatgaagattttcaacttaaagggccagcaaatatattcaacaaaattatagaagaaaacttcccaaacctaaagaatgacatacccatgaacatacaaggagcctacagaactccaaatagactggaccagaaaagaaattcctcccgacacataatattcagaacaacaaatgcactaaataaagagagaatattaaaagcagtaagggagaaaggtcaagtaacatataaaggcagacttatcagaattacaccagacttttcaccagagactatgaaagccagaagagcctgggcagatgttttacagacactaagagaacataaatgccagcccaggctactatacccggccaaactctcaattaccatagatggagaatccaaagtattccaggacaaaaccaaattcacacattatcgttccaggaatccagcccttcaaaggataataacagaaaagaagcaataaaaggacggaaatcacgccctagaaaaagcaagaaagtaatcactcaacaaaccaaaaagaagacagccacaagaacagaatgccaactgtaacaacaaaaataaaaaggaagcaacaattacttttccttaatatctcttaatatcaatggactcaattccccaataaaaagacataaactaacagactggctacacaaacagaacccaacattatgctgcttacaggaaacccatctcagggaaaaagacaaacactacctcagagtgaaaggctggaaaacaattttccaagcaaatggtctgaagaaacaagctggagtagccattctaatatcagataaaatcaacttccaacccaaagttatcaaaaaagacaaggagggacacttcatactcatcaaaggtaaaatcctccaagatgaactctcaattctaaatatctacgctccaaatgcaagggcagccacattcattaaagacactttagtaaagctcaaagcacacattgcacctcacacaataatagtgggagacttcaacacaccactttcttcaatggacagatcgtggaaacagaaactaaacagggacacagtgaaactaacagaagttatgaaacaaatggacctgacagatatctacagaacattttatcctaaaacaaaaggatataccttcttctcagcacctcatggaaccttctccaaaattgaccatataattggtcacaaaacaggcctcaacagatacaaaaatattgaaattgtcccatgtatcctatcagaccaccatggcctaagactgatcttcaataacaacatcaataatggaaagccaacatttccgtggaaactgaataacactcttctcaatgataccttggtcaaggaaggaataaagaaagaaattaaagactttttagagtttaatgaaaatgaagccacaacgtacccaaacctatgggacacaatgaaagcatttctaagagggaaactcatagctctgagtgcctccaagaagaaacgggagagagagcacatactagcagcttgacaacagatgtaaaagctctagaaaaaaaggaagcaaattcacccaagaggagtagacggcaggaaataatcaaactcaggggtgaaattaaccaagtggaaacaagaagaactattcaaaaattaaccaaacgaggaggtggttctttgagaaaatcaacaagatagataaacccttagctagactcactagagggcacagggacaacatcctaattaacaaaatcagaaatgaaaagggagacataacaacagatcctgaagaaatccaaaacaccatcagatccttctacaaaaggctatactcaacaaaactggaaaacctggacgaaatggacaaatttctagacagataccaggtaccaaagttaaatcaggatcaagttaacattctaaacagtctcatatcccctaaggaaatagatgcagtcattaatagtctcccaaccaaaaaaggcccaggaccagatgggtttagtgcggagttctaccagaccatcaaagaagatctaatcccagttctgcacaaactattccacaaaatagaagtagagggaactctaccccactcattctatgaagccacaattactctgatacctaaaccacagaaagatccaacaaagatagagaacttcagaccaatttcccttatgaatattgatgcaaaaatccacaataaaattcttgctaaccgaatccaagaacacattaaagcaatcatccatcctgaccaagtaggtttttttccagggatgcagggatggtttaatatatgaaaatccaccaatgtaatccattatataaacaaactcaaagacaaaaaccacatgatcatctcgttagatgcagaaaaagcattcgacaagatccaacacccattcatgataaaagtcttggaaagatcaggaattcaaggcccatacctaaacatgataaaagcaatctacagcaaaccagtagccaacatcaaagtaaatggtgagaagcttgaagcaatcccactaaaatcagggactagacaaggctgcccactttctccctacctcttcaacatagtacttgaagtcctagcccgagcaattcgacaacaaaaggagatcaaggggatacaaattggaaaagaggaagtcaaaatatcactttttgcagatgatatgatagtatatataagtgaccctaaaaattccaccagagaactcctaaacctgataaacggcttcgatgaagtagctggataaaaaattaactcaaacaagtcaatggcctttctctacacaaagaataaacaggctgagaaagaaattagggaaacaacacccttctcaatagtcacaaataatataaaatatcttggcgtgactctaactaaggaagtgaaagatctgtatgataaaaacttcaagtccctgaagaaagaaattaaagaagatcttagaagatggaaagttctcccatgctcatggattggcaggatcaacattgtaaaaatggctatcttgccaaaaatcaatctacagattcaatgcaatccccatcaaaattccaactcaattcttcaaggaattagaaagagcaatctgcaaattcatctggaataacaaaaaacctaggatagcaaaagctcttctcaaggataaattacctctggtggaatcaccatgcctgactaaaagctttactacagagcaattgtgataaaaactgcatggtactggtatagtgacagacaagtagaccaatgaaatagaattgaagacccaaaaatgaacccacacacctatggtcacttgatcttcgacaagggagctaaaatcatccagtggaagaaagacagcattttcaacaaatggtgctgacacaactggtggttatcatgtataagaatggaaatcgatccattcctctctccttgttctaaggtcaaatctaagtggatcaaggaactccacataaaaccagagacactgaaacttatagaggagaaagaggggaaaagtctcaaagatatgggcacatggaaaaaattcctgaatagaatagcaatggcttgtactttaagatcgaggattgacaaatgggacctcatgaaactgcaaagcttctgcaaggcaaaagacaccatcaataagacaaaaagaccaccaacagattgggaaaggatctttacctatcctaaatcagataggggactaatatccaatatatataaagaactcaagacggtggactccagaaaatcaaataaccccattaaaaaatggggctcagagctaaacaaagaattcttacctgaggaatactgaatggctgagaaacaccttaaaaaatgttcagcatccttaatcatcagggaaatgcaaatcaaaacaaccctaagattccatctcacaccagtcagaatggctaagatcaaaaattcaggtgacagcagatgctggcgtggatgtggagaaagaggaacattcctccattgttggtgggattgcaagcttgtacaaccactctggaaatcagtctggcggttcctcagaaaattggacatagtactacctgaggatcctgcaatacctctcctgggcatatatccataagatgtcccaaccggtaagaaggacacatgctccactatgttcatagcagccttatttataatagccagaagctggaaagaacccagatgcctttcaacagaggaatggatacaaaaaatgtgatacatttacacaatggagtaccactcagctattaaaaagaatgaatttatgaaattcctaggcaaatggatggacctggagggcatcatcctgagtgaggtaacccaatcacaaaagaactgaaatgatatgtactcactgataagtggatattagcccagaaacttagtatacccgagatataagatacaatttgcaaaacacatgaaactgaagaaaaacgaagaccaaactgtggacactttgccccttcttagaattggaaacagtcacctatggaagcagttacagagacaaagtttggagctgagacaaaaggatggaccatctagagattgctgtatccagggatccatcccacaattagcctccaaacaatgactccattgcaaacactagcaaacgttgactgaaaggaccctgatatagctgtctcttgtgagactaggccggtgcctagcaaacacataagtggatgttcacagtcagctattggatggagcacagggcccccaatggaggagctagagaaagtatccaaggagctaaagagatctgcaaccctatcggaggaacaacattatgaactaaccagtaccccagagctcttgactctagctgcatatgtatcaaaagatgacctagtcggccatcactggaaagagaggcccattggtcaggcaaacgttatatgccccagtacaggggaatgccagggccaaaaaatgggaatgggtgggtaggggagttgggggtggggggacttttgggataacattggaaatgtaattgaagaaaatacgtaataaaaaaagaaaaataaataaaatttaaaaaaaaagaaaaaaaagtatactatcataccatctgcaaacagtgtaacagtgttattttgacttcttccttttgtaccctttgacctccttttgatgtctaattgctctagctagaacttcaactactatattgaataatagggagaaagtgtacagccttgtctagtccctgaatttagcagaattgcttcaagtttctctccattaagtttgatgttggctatttgtttgctgtatatttcttttactatgtttagttatgggccttgaattcttgatctttccaagagttttaacatgaagggatgttgaattttgtcaaatgctttttcagcatctaatgaaatgatcatgtttttttttttcatttagtttgtttatgtaatggattacattgatggatttccatatattgaaccaaccctgaattcctgggatgaatcctacttgatcattgtgattatttttatgtgtttttggattctatttgtgagaatttattgagtatttttgatgttaagagatactaaggaatagagattattgcttcctgttatttttgatgttatttttatgtttgtgtggctatcttcttttgggtttgttgaaagaagattactttattgctttttatagggtgtaatttccctccttgtgttggtgttttccatcttttatcctttgtggggctggattgatggaaagatgttgtttaaatttggttttgtcatggaatatcttatttcctccatctatggtaattgagaattttgttgggtataataacctgggctggcatttgtgctctattaattctcttagtgtctgtatgatgtctgcccaagatcacctggcttttagtgtctctgatgagaagtctggtgtaattcttataggtctgcctttatattttatacttgacctttccctcttactgctttcaatcgtctttctttgttttgtgcatttggtgttttgatttttacgtgacatttttttctggtccaatctatttggagttctgtaggcttcttgtatgtttatgggcatttctttctttaggttagggaagctctcttctgtaattccagtgcctggaagtggtgtctcctctaaggaccgtggggctgtctggtgtgtttgaaaccaaagtataccagcaccaatcagaaggaactcaagctgctggtcaggcagggcccccgtattcttgcttctgctatcacaggccagttacaattgatttggaacagatgttttgttccactcaccagtgatcctaagatcatgtggagagtcttctggggactgtgggactgtccgccgagttcgtgcccaaggtgacctggagctggcgccgaccggaagggacttgatgtatatctggtttcaggttgaggtcctcaatccacttgaacttgagctttgtgcaaggtgacaaatatgggtctattttcatttttctacacaccgactgccagttagaccagcaccatttattggagatgctttctttttccactgtatatttttacttcgttgtcaaagatcaagtgtcagtaagtatgtaggtttatttctgtgtcttcatttcaattccattgatcaacctgtctgtctctgtaccaataccatgaaatttttagtcactattgctttgtagtatagcttaaggtcagggatggtgattaccctagaagtttttttattgctaaaaattgttttccctattctgagttttttggtttttccatatgaaattaagacttgctatttccatgtctttgaagaatcatgttggaactttgatgggaactgcattgaatctgtagattactgttggtaagatgtccattttcagtgtgttaatcctaccaatcgatgagcatgggtggtcttctcatcttctgagatcttcaatttctttctccagaggcttgaagttcttgtcatgcagatctttcacttgcttggtaaaagttacatcaagatattttgtattgtatgtggctattgtgaagggtatagtttctgtactttctttctcatcctatttatcatttacatgaaggagagctaccgatttccttgagttaattttatatccaaagactttgctggagatttttatcagctgtaggagttctctggtagggagtgggtgggttaggagcagagggaggggagagggtatagtggatttttggagaggaaagtaggaaatgtaaatgaagaaaacatctaataaaaaaatgagttctctggtagaattttggggccatttatgtattctatcatatcatgtatgaacagtgatactttaacttctttctttccaatttgtatcccattgacctgctttttttgtcttatttctctaactataactttgagtactatattgaatagatagggagagagtgggcagccttgacttatccccgtttttagtaggattgcttcaagtttctctccatttaacttgatgttggctattggcttcctgtatattgcttttattatttttatgtatgtgccttgaatccctgatctctccaaaacttttaacatgaagaagtttggattttgtcaaaagctttttcaacatctaataagattatcgtgtgattttttttctttacatttgcttatttgattacactgtggaattttatgttgaactatctctgcatccctaggatgaagcctacttgatcatggtgcttttgatgtgctcttggatttagtttgcaagaattatgagtaatttagttttaatgagcatatgtgaaattgttggttctctttaattgttgagtgtgtgatttagctatcagggtaactatggcctcgtagaataaagtgggtagtgtcccttatgtttctattttgtggactagtttgaggagtattgttattagctcttctttgaaaatctgggagaattctgcactaaaatcatctggcccttgtgaggagtgggtgtggccatgtcctcaagatggcgcccgggacggctgccaagtcttatgactggcacctgacttcctcatatccctcaagatagccacgtaccttgagctgcattgcgcagatgcaccacgacgtaagataggatgatgtacaaatgtagtcctgagccaatgaactgtgcctacgtggactggggtgagggggagtggactggaggggataaaggagggtggccaagagaggtcggggcattctttttcctacacatttgtgaagttcctgaataaactgccttgagaaagacgtctgtttcgtcgcttcttttctgctggtcggagatggtagcgacaagtggtggaacctgtactgggacgtgacgagtccagaactcttggctgtcagggtagctggctggaaagctcccaggtaagttggatgattcaagttctcagttagagactattaagttcccggattagggactattgaggttctcggaatgagacaattaaagttacacacggatatagtgtagtgatccaaaaattaaaagaaaagcaattggttgtatccccagaaaaggttcagaaaggaaaagtggtgaattatttaggaacaaaaatttttgatagtcaagtatctccccagaaatttcagattcggatggataatttgaggacattgaatgattttcaaaagctattgggggatatacagtaggtatgtccctatttgggcctaaccaacaaacaattacaaccattatatgatattttaccaggagatatagaattaaattctccccggcagcttactgattttgcccacgtagcgttacatttggttgaaaagggtattcaaacagcaacattaaagagaagagatctgttcagtcctattattttgtgcatcctgccctcagagacccagcccactggagtgctctggcagggcgcctttttgctatggatacatcccaagatttcacctgcaaaaatcttgtctttttaccctgcctcggtagaacaattggccttgattggcctacaacaatgtattcaatattttggcaatccccctcagggattgattgctccatataatatgaagcaaatagacgtattataagctactgttgatgattgggcaattctgagatgtagctttatgggaaagatggataatcatttccctaaggatcccattttgcagctgattaaagctcatccagttgtttgtccacgaattacttctcgagtgccattgcctgatgcccctttaatttttacagatgggtctaagacaggctgcggagcatatttggtccatggctccacggcagtaactttacagtttccccctgcttctccccaagtaattgagttgcacattgttataaaagtttttgaattgtattctgaatcctttaatttaatttcagatagtcagtatgtggttaattcattagcagtgctggaagtggcagggaaggtgaatttttgatccactataggggatttgttaaataaattgcaatccttaattttaaatagaagttctccattttttgtccaacacattcgagctcatacaggtttgcctggccctttagcagagggcaattatttggttgataaagctgctagagctgcttctgcctttttttgatacaaacacctgtagaactggcttgtgaatttcattcacagtttcatgtgaattccaaaacactttcttctcgatttcatattactagagcagaggcaagggatattgttatggcttgcaaagcctgtgcccctctattgcttcaggcaagtgtgggagtaaaccctcgcagcctgcttcccctccacatttggcaaatggatgtgactcatttttcagaatttggtaaactgcaatttgttcatgtttctgtagataacagcctctggggtgttgtttgcctccctgcatactggtgaaaaggcatgccatgtcattgcccatagctttgaggcatggggtgcatggggtcagcccagagagcttaagactgataatggccctgcttatacttcagcttcttttgtttccttttgtaaaatgatgggtgtccacttggtgcatggtattccctacaatcctcagggccagggcatcattgaaagagcccatcgcactctgaaagaatatctaataaaacagtaatggggtgtagcctttggcgctactcctagggagagattagccattgctctctttaccttgaattttttgaataaagataaaaatgatttgactgctgtggaacggtttgccaatcccgagacatcctacaaaggcacagtcatgtggaaggatgttctaagtgcacaatggcatgggcctgatcctgtgttgatctgggcgagagggtctgtttgtgtgtttccacaggatcattgccagccactgtgggttctggagcgattgatgagggtagttcaagatggacggaggtgccctgatgaagctgctcctgggagtgatgatgcctgcatcatcatgaagggcccccttttgtaggggtattcgagattcactgctcccatggaccggctgccagtccaggaaagctgcgtaggccgtgaaaaaaaaatttaccttttccccttatattagtaccagtcataatcaagcgtttttagggttaaattggatgtatcaaaatccagcccggagaggggcaagcaatccctttaatatttggctgttgtgtgggataaattgggagttgtacagatctttctcctttgagtatgttgatgggtggggcgtggggaaatactagcttttattagaatggatctgtattaagtcttctgttaatcaatttgcttatgggaagaatgaattctttaaagccacgcctgtatgcgtttggcctccttttgtatttttagtttataatggtagttattttgatgatgttgtagaatgtaaggatagttgtttttatagtatgtgttggaatgcttctatgttttctttagctattgtgaccagaatgcggaatttgtaccatggcctgtgcagaccccttcggttatgacctttagacccaaaagagattttgggatagtccatatcaattccactcgggtggaggtatccatggatgaaggacttgcacattggattgccacagctatgtcacacctaagggaatgggccggtattggtggattggcactgtgctgcgtgctcatcagtgtcctggccttttggtgcatctgccacatgcaacatcgccatcgcagggctcaagctctgttgatacaagcctttgcagctgtggagatgggaaaatctcctcaagtgtggcttggcatgctagggaagtagtcaatgatgggtaagactccctggacatgttaccaacctaagacagggatcagaccactgctgtctgtctcccgatgatgggtaaggagcattgttgcagagggcaacctaagacaggcattctctctgccaatttaaagaataagagggagatgtgaggagcaggtgtggccgcagccccaagatggcacccgggactgctgccaagtcttatgactagcacctgacttcctcatatccctcaagatagccacgtaccttgagctgcattgcgcagatgtaccacaacgtaagataggatgatgtacaaatgtagtcctgagccaatgaactgtgcctacgtggactgggatgagggggagtggactggaggggataaaggaagatggccaagagaggtcggggcattcttctttttcctacacatttgtgaagttcctgaataaactgccttgagaaagacgtctgtttcgtcgcttcttttctgctggtcggagacagtagcgacaggccctgagatttttttttggttggggggtctttctactgtcttaggagttatgggaccatttagatggtttacctaatcttggcttaactttggtatgtggtatctatttagaaaatcatccacttcgtttagattttacaattttggtaagtatgggcttttaaagtaaggcctaatgatttttttttaatttcctcagtttctgttatgtctcctgtttcatttctgattttgttaatttggatagtgtctctgtgtctttttagctagtttggctaagggcttgtctatattgttgattatctcaaagaactagctcttggttttgttgattctttgtattgttctctttgtttctaactgatatcagtcgaatttgactgtttcctgccacctattcttcttgggtgtgtttgctttattttattctaaagctttctagcatgctgttaagttgctagtgtgaaatttctataatttctttaggaaggcacttagtgctaagaattttcctcttaccactgcttccattgtgtcctctaagtttgcttatgatgtgctttcattctcattgaattctaggaaatatttaattatgttctttctttctttgctaagtgatcattgaatagaaagttgttcaatttgcatgggtatgtgggctttctgttgctactgctgttgttgatgtccagcattagtctgtggtgatctgatggagtgcaagaggttatttcaatcttcttgtatttgttgaagcttgctttgtgtctgattatgtgatccattttagaaaaattttcatgtaatcctgagaagaaggtatatcttttgttttggggtggaaggttcatagatatctgttaaattcatttggttcaaaacttctattagttgtgtatttagtttctatttcaatgacctgtccattggtaagactgtgatgttgaagtctcctgctattattgtgtggggatcaatgtgtgttttgagatttcgtggttccttttacaaacgtgggttttgaattttcaacatcaatttgcagaattaagacttcatcttggtaggtttctttctttgatgagtatgaagtgttcttcctgatctcttttgattgaaagtctatttcattggatattataatggctactacagtttgtttcttgggactgtttgcttggaaatcatttttccaaccctttattctgaggtgtgtttcttatatgcagcagaatgatgggtcgtgtttacttatccaatctgctagtatgtgtcatttttattggtcaattgagtccattgatattgagatattaatgaccagggtttgttagttcctgttattttgttgttggagttggtactgtatgtgtgacttctttggggtttgctgtaagatgattaatttttgtgttttcttgggtgtagttaccctccttgtgttggagttttccttctggtattctctgtatggttggattggtagaaagatgtggcttaaacttgattttgttatgggatatcttagtttctccatctatggtgattgagacttttgcaggtatagtaatctgtgctggcatctgtagtctcttatggtctgcaagacatctgtccaggatcttctggctctaagaatttctgttagttctgataggtctgtctttatacgttacttgcactttttcccttgcagcatttaatattctttcttgttatgtacatgtaatattttggttattatgtggtggaacgattttcttttctaatccaatctatttgctgttctttaggcttcttgtatgttcttagtcatgtctttctttaggttaggaaagttttcttctattttgttgaagatgtttgctgaccctttgaactgggaatcttcaccctcttctattcttattattcttagatttagtcttttcatttagtcccaaatttcctggatattttgattcaggagctttttacatttgatctatcctttaaccaatgtatccttctatgatatcttctacacttgagattctttcttccatgtctcgtattctgttggttatgcttgtgtctgtagttcctattctctttcctaggttttccatctgcaagttttcctctattttattttccttattggttctatttccatttttaggtattagattgttttgtccatttccttcatctgtttggttgtatatatttttctgtgtttctttgagatttatttctttcctctttaagggattcgacctgtttaattgtgtttcccagtattttttaagggaatgatttatattctctttgagggcctctaaaatcttcatgataagggatttaaggtcagaatcttgcttttcgggtgtgttaggatatcaaaaacttgctgtaataggagagttgggttctttttttttattattattacgtattttcctcaattacatttccaatgctttcccaaaagtcccccataccctccccccacttccctacacaaccaatcccattttttggccctggtgttcccctgtatggggcatattaagtttgcatgtccaatgggcctctctttccagtgatggccgactaggccatcttttgatacatactcagctagagttaagagctccagggtactggttagttaataatgttgttgcacctacagggttgcagatctctttagctccttggatactttctctaactcctccattgggggccctgtgctccatccaatagctgactgtgaacatccacttatgtgtttgctaggcaccggcctagtctcacaagagacagctatatcagggtcctttcagccaacgtttgctagtgtttgcaatggagtcatcgtttggaggctaattgtgggatggatccctggatacagcaatctctagatggtccatccttttgtctcagctccaaactttgtctctgtaactgcttccataggtgactatttccaattctaagaaggggcaaagtgtccacagtttggtcttcgtttttcttcagtttcatgtgttttgcaaattgtatcttatatctcgggtatactaagtttctgggctaatatccacttatcagtgagtacatatcatttcagttcttttgtgattgggttacctcactcaggatgatgccctccaggtccatccatttgcctaggaatttcataaattcattctttttaatagctgagtagtactccattgtgtaaatgtaccacattttttgtatccattcctctgttgaaaggcatctgggttctttccagcttctgcttattataaataaggctgctatgaacatagtggagcatgtgtccttcttaccggttgggacatcttatggatatatgcccaggagaggtattgcaggatcctcaggtagtactatgtccaattttctgaggaaccgccagactgatttccagagtggttgtacaagcttgcaatcccaccaacaatggaggaatgttcctctttctccacatccacgccagcatctgctgtcacctgaatttttgatcttagccattctgactggtgtgagatggaatcttagggttgttttgatttgcatttccctgatgattaaggatgctgaacattttttaaggtgtttctcagccattaagtattcctcagttgagaattctttgtttagctctgagccccattttttaatggggttatttgattttctggagtccaccgtcttgagttctttatatatattggatattagtcccctatctgatttaggataggtaaagatcctttcccaatctgttggtggtctttttgtcttattgatggtgtcttttgccttgcagaagctttgcagtttcatgaggtcccatttgtcaatcctcgatcttaaagcacaagccattgctattctattcaggaatttttccatgtgcccatatctttgagacttttccccactttctcctctataagtttcagtgtctctggttttatgtggagttccttgatccacttagatttgaccttagaacaaggagagaggaatggatcgatttccattcttatacatgataaccaccagttgtgtcagcaccatttgttgaaaatgctgtctttcttccactggatgattttagctcccttgtcgaagatcaagtgaccataggtgtgtgggttcatttttgggtcttcaattctatttcattggtctacttgtctgtctctataccagtaccatgcagtttttatcacaattgctctgtagtaaagctttaggtcaggcatggtgattccaccagaggttcttttatccttgagaagagcttttgctatcctaggttttttgttattccagatgaatttgcagattgctctttctaattccttgaagaattgagttggaattttgatggggattgcattgaatctgtagattgatttttggcaagatagccatttttacaatgttgatcctgccaatccaggagcatgggagatctttccatcttctgagatcttctttaatttctttcttcagggacttgaagtttttatcatacagatctttcacttccttagttagagtcacgccaagatattttatattatttgtgactattgagaagggtgttgtttccctaatttctttctcagcctgtttattctttgtgtagagaaaggccattgacttgtttgagttaattttatatccagctacttcaccgaagctgtttatcaggtttaggagttctctggtggaatttttagggtcacttatatatactatcatatcatctgcaaaaagtgatattttgacttcctcttttccaatttgtatccccttgatctccttttgttgtcgaattgctcgggctaggacttcaagtactatgttgaagaggtagggagaaagtgggcagccttgtctagtccctgattttagtgggattgcttcaagcttctcaccatttactttgatgttggctactggtttgctgtagattgcttttatcatgtttaggtatgggccttgaattcctgatctttccaagacttttatcatgaatgggtgttggatcttgtcgaatgctttttctgcatctaacgagatgatcatgtggtttttgtctttgagtttgtttatataatggattacattggtggattttcgtatattaaaccatccctgcatccctggaaaaaaacctacttggtcaggatggatgattgctttaatgtgttcttggttcggttagcaagaattttattgaggatttttgcatcgatattcataagggaaattggtctgaagttctctatctttgttggatctttctgtggtttaggtatcagagtaattgtggcttcatagaatgagttgggtagagttccctctacttctattttgtggaatagtttgtgcagaactgggattagatcttctttgatggtctggtagaactccgcactaaacccatctggtccagggcttttttttggctgggagactattaatgactgcttctatttccttaggggatatgggactgtttagaacgttaacttgatcctgatttaactttggtacctggtatctgtctagaaatttgtccatttcgtccaggttttccagttttgttgagtatagccttttgtagaaggatctgatggtgttttggatttcttcaggatctgttgttatgtctcccttttcatttctgattttgttaattaggatgttgtccctgtgccctctagtgagtctagctaagagtttatctatcttgttgattttctcaaagaaccaactcctcgtttggttaattctttgaatagttcttcttgtttccacttgattgatttcacccctgtgtttgattatttcctgatgtctactcctcttgggtgaatttgcttccttttttctagagcttttacatgtgttgtcaagctgctagtatgtgctctctcccgtttctttttggaggcactcatagctatgagtttccctcttagagatgctttcattgtgtcccataggtttggatatgttgtggcttcattttcattagactctaaaaagtctttaattttttcattattccttccttgaccaaggtatcattgagaagagtgttgttcagtttccatgtgaatgttggctttccattatttatgttgttattgaagatcagccttaggccatggtggtctgataggatacatgggacaatttcaatatttttgtatctgttgaggcctgttttgtgaccaattatatggtcaattttggagaaggtcctgtgaggtgctgagaagaatttatatccttttgttttaggataaaacgttctgtagatatctgtcagatccatttgtttcataacttctgttagtttcactgtgtccttgtttagtttctgtttccatgatctgtccattgtagaaagtggtgtgttgaagtctcccactattattgtgtgaggtgcaatgtgtgctttgagctttactaaagtgtctttaatgaatgtggctgcccttgcatttggagcgtatatatttagaattgagagttcatcttggaggattttaccattgatgagtatgaagtgtccctccttgtcttttttgataactttgggttagaagtcgattttatctgatattagaatggctactccagcttgtttcttcagaccatttgcttggaaaattgttttccagcctttcactctgatgtagtgtctgtctttttccctgagatgggtttcctgtaagcagcagaatgttgggttctgtttgtgtagccagtctgttagtctatgtctttttattggggaattgagtccattgatattaagagatattaaagaaaagtaattgttgcttccttttatttttgttgttacagttggcattctgttcttgtggctgtctttttttttttttttttttttttttttttggtttgttgagggattactttcttgcttgttctagggcgtgatttccgtccttgtattgcttcttttctgttattatcctttgaagggctggattcgtggaaagataatatgtgaatttggttttgtcgtggaatactttcgtttctacatctatggtaattgagagttaggcacgtatagtagcctgggctggcatttgtgttctcttagtgtctgtataacatctgtccaggctcttctggctttcatagtctctggtgaaaagtctggtgtaattctataggcctgcctttatatgttacttgacctttctcccttactgcttttaatattctctctttatttagtgcatttgttgttctgattattatgtgtcgggaggaatttcttttctggtccagtctatttggagttctgtaggcttcttgtatgttcatgggcatgtcattctttaggtttgggaagttttcttctataattttgttgaatatatttgctggccctttaagttgaaaatcttcattctcctcaactcctattatccgtaggtttggtcttctcattgtgtcctagatttcctggatgttttgagttaggatccttttgcattttgtattatctttgattgttgtgccgatgttctctatggaatcttctgcccttgagattctctcttccatctcttgtattctgttgctgatcctcgtgtctatggttccagatttctttcctagggtttctatctccagtgttgcctcactttgggttttctttattgtgtctacttccctttttaggtctagtatggttttgttcatttccatcacctgtttggatgtgttttcctgtttttctataaggacttgtaactctttagcagtgttctcctgtatttctttaagtgagttattaaagttcttcttgatgtcctctaccatcatcatgagatatgcttttaaatccgggtctagcttttcggttgtgctggggtgcccaggaccaagtgtcgtgggagtgctgagttctgatgattgtgagcggtcttgatttctgttagtaggattcttacgtttgccttttgccatcttgtattctctggagctagttgttatagttgtctctggttagagcttgttcctcaggtgattatgttagcctctaatagcaggcctgggaggctagctctatccttagtttcagtggtcagagtactctctgcatgcaagctctcctcttgcagggatggtgcccagatatctggtgtttgaatctgcctcctgacagaagttgtgttccactcaccagaggacttaggatcccgtggcggatcctgtgtgggtccttgtgggtgtctgtagactcccccaggccaggaaccccggtgctgcagtgggcaggccggaagggacttgagccccgtatcaggtcgggtttcctgcttccttaattaatgcagtctcaggacgtgcacgtgcacgattggaatggagcgggcactgtgttctactcaccagaggtcttaggatcccgtggcggatcctgtgtgggtccttgcgggtgtccgcaggctcccccgggccaggggccatggtgctgatgctgcagttcatctctaatttttattaattttgatggaatccatagcttttcttcttctgttaaaacaaagacaaaaacctcttccccaacacaacacattttttgcctctgattctgagattatcacatatatagactgatctaattcaacattcctttctaaattccagtatttttcagcagctatgctacatgtcttactgacattaaaaaattttaaatcaataaaacattatttagtctatttctgggagatcccatagcccacttctattctatattattatctattgtttgtcctacaagattgtaaattatatctctaacatgtattatgccataatgtctaaaatattattgtatctaatggaaacatatgtcatcacatcaacacttcaatttgtaaactgattatagcacttcaagctataaacatgtccccaagatacccactacttctaataaatgtgtaataataaatccttcctttcagaactcaaggcaaaaaccccttggaattctgaacaagcctcagatgtataatgtatgtatgtatctatgtatgtatgtatgtacatatttaaaattttcaaactctacaagatgaaacacataagctattgcataacattgctctaaggtgattttattaaacagaatctacattttaccttgtatactgtatctctacaggttgtcatttgaattcctcaagcctttgtggatttttctcatcttgaactacattttttgctgtaattgtaggttccaatttggattcttctagacattcattattcttatttaaggaattctctgatctgttctagggtctccaacctagcatttaattttttagtcttctcattctctaagtctgttttattctactgtttcttttttaaaaggatatacaaaaatgtaaacattactgaaaaaaataattatttatatgctgataagtaaaacaaaatttataagggatctagatccattgtgtcactgtattttccatttttaacaaaaccaaaaaaaaatgtttttcttttactctctaactctatccttaagtactttccatgtatctaaccaagtatgttgacttttcaacttttcctgccatctccatgtatctgcagatgttgtctgacaagtttctctgccactcatccagcacttcatgcaggttgctggttcctagctctgtccacctctagtcagtccttctctccatatgactctgtatggttgcaggctttcacctacaggtaccaaacagcaattctggacccacagactcattcacatatgactgggcctgttctctgacctctgcccactttgtgaaggtggttccaggacaaacagtgttgctatctattctggctctgagtcattgcacgcttcccctcctccatcccaggaacatgttggtttctcaccagcccagtccctctgctcattccctctgccatatctgggaagtacactatcatggagcagctccatcaggccttctcttaaaagagacatgcccgtgatttgcactgagtctttctattggctctatattaaagggaatgccttatacacagaaaactgctcttggaggtgtttgttcctgtcttttcacctaaggcttattcttaagttctaagcctggatttcataagcccttacattgtgttgatctgtctgtcattcaccgactccttgttcatctgcacccagagacatttgtaaccattagttctttttttctgtgccaaacttcacaaattactaggaggttattatttatcaacaaatgcctaggcaactcaaccatcctgtccacaccactccatttctgctacatggatagttaccactctttagtttcatacatctgacttcctctgagtcccagtgatgaatcttctcacacctctttatttcccaggttttctctcttctcttcctcttcctcttctcttctcttctcttctcctctcctctcctctcctctcttctcctctcctctcctctcctctcctctcctcttctctcctccctccatccccctccctccctccctccttccccctcagttgttccaccttctaatcctgtttcagtctattgtccatcagatttttattgataggtgatgcttttacacaatacacaggagattatccctacaaaacttagtacaactgttctctgagagacttaacccaaaagctgatggaaacagaaacagatactcacagccaaacattatgtggagctcaggaaatcttgtgaaagatggataggaatgattgaaggagctagaggggtcaggaacaccacaagaaaacctaaagacttgcagcagacctcctcttgggtcccttgtctgtgtaggacgggtctctgggtgcagatgaacaaggagtcggtgaatgacagacagatcaacacaggagattgtgtagaatctaaatgtaatgtcataaagtgaacagcagtcttatataatacagaaaataaagggagtaagatgtcacagcaggcaaagtacattgaagttacctgacacaaaacaaaggaatgacttcaaaaggacttacaggacccaggtaaatgtttatagtaaagataaagcagctctgcttagggtcagcttaattacaggtaaggatttcacaacctagttacaatttgtgctactcctttgagccttgtgaaaactagcaccaggggttctgctctagcagaccttctcatgaataatgcaataccacaatccccctatttcctgggccttgataaattcttatatgagtgtaacttggctgttcttttaagtatctatggagaatctccaattcaccaacttgcttctaatatgcaatgtagcctgccatacctggctgtagtgaagattcctgtctcagtgggattccctaacttttacatggtaaactcacctattagctaggccattgtgtatgggtgagactggctacggtctcaagtaaacactctgcagaccagccctgagctattctggctcggttctttgtaatgcttaattagtttcactgcctctactagaagaaaatttgaatgttactgaataggtaaccttctcactgaattcctactgaattcccagtttgtcggcttcaaggattttctgggacgttggaacactggcaaaggcttagctatgtcagagttcaatcttaaaaggcacttataataaaataatactaaaagagagcacgtggatccatacaccagactaactcggggatagggtatgagtataccggttttgagaacaccaaagttccaggaggtgagtttctatgaaactctttgcctcatgagtgctcccagccctctcggcctgccaagcaaacttcactggagcatgcataccacagaatcaactaaatttggcccatagtggcttacagagattaaaccacaaagcaaagaatatgcatgggatatgtagcagatgtgcagcttggtcttcatgtggagccctaacaactaaagcaggggctacctctgactctcttgatttcctttggatccctttcccttaactgagctgccttgtctaagctcaaaaggaaaagatgcacctaattctactgtaacttgatgtgccaaggagggctgatattcatgataggcctcacttctctgacgaaaatgggagggaggctggaatgaggtgaggtgaatgaacgaaagggagaagggaagggaatctgtgattgtgatgtaataacctgttatccatccatgaggctgggaaaggatttgtttaatcacctggtgtgcatccagtggccagggagaactgggtatacctgaaagggagtctgggaatgaaatagaatgggtgatctgctgaaaattgacctttagcatcagtttgcaaaaaaaattgaaacaagtaagacaaaagcaaggtgtgctttttggtgaccttggaagatataactctcccctttttgtttttgtttttttgttttttgtttttaaaagccagtttttcagagtgcaatgtgcatgctcaacaattacctgtcccattgggttataaggaattccagttttgtgttcaataccaaattccttacaaataatgtaaagttatttccagtataagctggtccattatctgtcttaatgactttagataacccccatatcattaaaggcttgtaagcaatgatcaattacatttctagagacttctcccatatgtagagaagcaaaaaggaatcctaaacaagtctcaatgcagacatgtatatacttcaatttttcaaattctgcataatgagttacatccatttgccaaataagattgggcataaggcctcgtggattaagccctaaatgaggaactggagataatgtaaggaagttagggcattgttttacaatcattctagcctgctccttagtgatcttatgccggagccttaaggtatgactagaaagatgagttacagatattaactcctaagggaaatcagttttcatgaagagacattgcaaatttccagatataggaagcgctaatgccgtggcctcagttctttgggattcatatgactagagtggcaggagagaagaggacttagcattttgacagaagtcttcttgatcattaggaagaagaagggctgctattaggcaccaggaggagggaagtgtggcactcaattgacccacctagcaaatgcttgccaatttatttataagtagataactgtaatgatcccagattgggaagggcatgacacatgaaggccatggctcgggtctctcaaagatgtaggtctaggcacaccatcaaataagccactctgaaaaggagacttgcaaaggaacattaaaaagaaaagactgggtgacagagaaagaaaagaatagttgtcaattttaacactgagacaagtaggagtaattgtttatcctaatgatactgcttctcctaagtttcacccaggaaggaaggtctatgaaaaatcatgaagaatttgttcccgaaataaataggaagaggatgagtaaagttgtttcagagagtgcagcttaaagtaccaaaaatgctttcagttggctttcaggtgccaactgtgggatcctctcaaatcacacccttcttgggagcaggcacagtggttgtcacagtaggtatataagagtggcttctcttaaatcctcatgcaacacaaatcaaggttatcatttttgctcaagagtgccatctgctgtctgctgaatcctgcctgtcacctctaggtcacatatattctagtttttagaagaggaggaggagaagttattttatttatttacatgtcaaatgtcatcccctctcccagtttccccatagcaaaccccctattccctccaccctaggccctgaatctatgagggtgctcccccacccacccatctgcctcaccaccctagcattttcctacattgaggtatccaatctccacaggaacaagggcctaccctagcattgatggcaaataaggccatcctctgctacataagcagctggagccatgggtccctccatgtgtactctttggttggtggtttagtccctgggagctctggggggtctggttggttgataatgttgttcttactatggagttgccaacccctacagcttcttcagaccttcccctaactcctccattgcggtccctgtgctcagtctgatggtaggctgtgagcatccacatctgtattggtcagactctggcagagcctctcaggggacagtcataccaggctcctgccagcaagtgcttcttgacttcagcaatattgtcagagtttggagtctgcatatgggatggattcctgggtgggacaatctctggatagcctttccttcagtttctgctccactctttgtccctacatttcctttacacaggaacaattctgcattcatatttttgagatgagtagatggctccatccttcaaccaggggccatgcctaacccctggatatggtctctacaggttctctctcccctttgttgggtatttcagctaatgccatccccatttgggtcctaggagcctcttgatttcctggaatctgggactctctagtggctactcccagtttcccatcctccatagctacacacctctattcaatttcctgaccctcagtacttctcctcccaccatgtcctcccacacttaatcctgccccctttctctcttctttcttctccctacccggttgctccctccctctacctcccttgattattttgttcacccttctaagtaggactgaagcatccacattttggtcttatttcttcttgagtttcatatggtctgtgagctatatgatgggtattctgagctttgtgcctaatagccaattatcagtgagtacatactatgtgtgatcttttgtgactgggttacctcactcaggatgatattttctagttccatccatctgcctgtgaatttcatgaagtcattgtttttaatagctgagtagaactccattgtgtagatgtatcacattttctctatccatccttctgttgagtagttttgcatcaatattcataaggaaaattggtctgaagttctctttctttgttgggtctttgtgtggtttaggtatcagcataactgtgacttcactttgtagaatgaattaggcagtgttccttctgtttctattttgtggaatagtttgaagagtattggtaatcgatcttctttgaaggtctcatagcattctgcactaaaaccatctaggcttgggcttttggggaggtggaagacttttaatgactgcttctatttctttttattggatattttatttacatttcaaatgttgtcccctttcctggttttccctccacaaacaccctatcccatttcctcttccccctgctactatgagggtgttcccccacccactccttcctcaccgccctggcattcccctacactgggacattgaacctacacaggaccaaggacctctcctcctactaatgccagataaggccatcctctgctacatatgcagctggagccatgggtccctccatgtgtactctttggttggtggtttagtccctgggacctctggggggtctggttggttgataatgttgttcttactatggagttgccaacccctacagcttcttcagtccttcccctaactcctccattgtgatccccgtgctcagtctgagggttgggtgtgagcatccacatctgtattggtcagactctggcagagcctctcaggggacagtcatactaggctcctgccagcaagtgcttcttgacttcaacaatactgtctaggtttggagtctgcatatgggatggatccctaagtggggcaatctctggatggcctttccttcaatctctcctccacactttgtccctatatttcctttacccacaatacaactcacagaccatatgaagctcaagaagaaggaacaccaaagtgtggacactttggtccttcttagaagggagaacaaaatactcacaggaggtagagggagggagggacttgggaggaagagaaaaggggaaggggacaaaagggggcaggatcaggtataggaggaaatgaggatgatatatagagggtcaggaaattgaacagaagtgtgtagcaagggggatggggaactgggggtagccacagaaagttccagatatcagaaaagcaagagggtcccaggacccaacagggatgagattagctgaaattcccgacaaatgagagggagagcctgtaaagaccatatccagaagttaggcaaagcttccggttgaaagatggggccacccactcatctccaaatttgtatcctggaattgcttttacttcgttatgggattgtttagatggtttatctgatcttgatttaactttggttcctgttatctgcctagaaaaccatccatttcatctagattttccagtttagtgcatggtgatctgataggatccaaggaattatttcaatcttgtatctgttgaggcttgtttgtgatcaattatatggtcaatttcgagaagtttccatgaggagctaagaagagtgtatattcttttgttttagggtgaaatgttctgtagatatctatctgttaaacccacttagttcataacctctattactttcactgtgtctctgtttaggctcggttttaatgacccatccattgatcagagttgagtgttggaatctcccactattattctgtgtgattcaatggatattttgagccttaataaagtttctgtgatgaatgtgggttcccttatatttggggcatagatgttcagaattgagactttctcttggtggatttttcctttgatgaatataaagttcccctccccatctcacttgatattgattgaaagtctactttattggatattaggatagcaactcctacttgtttctttcgaccatctgcttggaagactttttttccagccttttactctgaggtagtatctgtttttgtcattgagatgtgtttttgaaagcagcaaaatgctggatccttcttgcatttccagtctgtgagcttatgttattttaattgggtgattgagtccattgttattgagagatattaaagacagatgattattagttcctgttatgtttgtttttgtaggtggcattatgtgtatgtgattctctccttttggttttgttgtgagatgtttaatttcttgtttttttcctttggcataggtacctcctgggaggccttcagactctggggtcttcagaggagcagacaagctgatgatctgccccagccaagaattactttttcagataatatactgtacacaagtgaggctagaaattcaagcttcaagccagagacctctccctggttgaagatggtttccaagccaaggagcaggaacatgcaggaaggcagtgtgaaaatcagcctttataaagcccctgctgaatagaaaagctagctcttgaactggagcctcaaggcacagttacaacttctcccaagcatggcacagttccagagaaggattagaatggacactatgcttgacacacatggttctggggctagacctacacccacacccatccctaccccaatcccactcttccacaacccctgcatgaggccagagtcaactgcaccacaggagaagatgggcttctgccagtaactaggacatacagagccataactgggatctgtgcacttctctgaaaagccaatacacagcctacatggggataaacttctggggatcatgactggcagaacccaaggggtacctgtcactcaggaggggttaggcattcagtgaggcactggttaaactgcatgaatgtggggcttaggagacaccagctaaaaacatgtggaaggcagaaacatcactccatgtgaccaaaaatacaagagcaagaccaaccacaatgtgaggtctgagctgaaatcaggaagacaaaaaacatacagaagaaatctgagcacatcaaaatttgaatcaggttttaaaaaaatgtttgaaatcatgctttaatgctaaagagggagagagagagactaggtatgaaaattaatagacacatataaataatttaaaataaaacacataaagatgaggcacaggtgggagaggtgagttgtgcattgtccctgacctccattgtctggctctgggcttgccctactgtacagaggagccttgaaggatgccaaaagtgttctgcttctctatggaggactgtgagaccccaagcacaatcagtttggaaccctgttccaccaatcccttcccagtctggttcacctggagaacagacagcagaggtgagtttcatgcacatggttccctgacctccattgtctagctctgggcttgctctgactttttgaagaaacttcggggtccccaagattattccagttccccatgaaggcctacagggcccctaagaacaaatagtttggaacactgccccaccagtgccttgccaactgggtctacctgagggacagtaacctccattgtcttgcccttggcacctgctgccttcttggtgagttctgctgacatcagaatcatccagccaacaccaggaaacaccagatgagtaaagaacaccttaagaatacaatcaacaagaaccagggcagtttgacaccaccagagtccagctatcctactacagcaagccctgggtatcctaacaaaactgaggcgcaataagattatcttaaatccaatcttataatagaggcttttaaagagggaatagaaaagtcttttaaagaaatatagagacaagccccttccgctccactcgagccccagggtaccttgccagcagactcgcccgacacccgcacgggcccacacaggattccccaggggatcctaagacctctggtgagtggaacacggcgcctgccccaatccaatcgcgtggaacctgagaccacaggaaatagggaaacagactacccggggcctgccctggggcacaagccccttccgctccactcgagccccagggtaccttgccagcagactcgcccgacaaccgcatgggcccacacaggattccccacgggatcctaagacctctggtgagtggaacacggcacctgccccaatccaattgcccggaacctgagaccgtgggaaatagggaagcagactacccgggcctgacctggggcacaagccccttccgctccactcaagccccagggtaccttgccagcggagtcgcctgacacccgcaagggcccacacaggattccacacatgatcctaagaccactagtgagtggaacacaacttctgccaggagtctggttcgaacaccagatatctgggtaccttccctgcaagaagagagcttcctgcagagaatactctgcccactgaaactaaggagagagataccctcccaggtctgcttatagaggctaacagaatcacctgaagagcaagctcttaacagtgacaactataacagctagcttcagagattaccagatggcgaaaggcaaacgtaagaatcctactaaaagaaatcaagaccactcaccatcatcagaacgcagcactcccaccccacctagtcctgggcaccccaacacaactgaaaatctagacccagatttaaaaacatttctcatgatgatgatagaggacattaagaaggactttcataagtcacttaaagaattacaggagagcactgctaaagagttacaggcccttaaagaaaagcaggaaaacacaaccaaacaggtagaagtcctaaaagaaaaacaggaaaacacatccaaacaggtgatggaaatgaacaaaaccatactagacctaaaaggggaagtagacacaataaagaaaacccaaagcaaggcaacgctggagatagaaaccctaggaaagagatctggaaccatagatgcgagcatcagcaacagaatacaagaaatggaagagagaatctcaggtgcagaagattccatagagaacatcgacacaacagtcaaagaaaatacaaaatgcaaaaggatcctaactcaaaacatccaggtaatccaggacacaatgagaagaccaaacctacagataataggaattgatgagaatgaagattttcaacttaaagggccagctaatatcttcaacaaaataatagaagaaaacttcccaaacataaagaaagagatgcccatgatcatacaagaagcctacagaactccaaatagactggaccagaaaagaaattccacccgacacataataatcagaacaacaaatgcactaaataaagatagaatattaaaagcagtaagggagaaaggtcaagtaacatataaaggaaggcctatcagaattacaccagacttttcaccagagactatgaaagccagaagagcctggacagatgttatacagacactaagagaacacaaatgccagcccaggctactatacccggccaaactctcaattaccatagatgtagaaaccaaagtattccacgacaaaaccaaattcacacgatatctttccaagaatccagcccatgaaaggataataacagaaaagaagcaatacaaggacggaaatcacgccctagaacaagcaagaaagtaatcactcaacaaaccaaaaagaagacagccacaagaacagaatgccaactgtaacaacaaaaataaaaggatgcaacaattacttttccttaatatctcttaatatcaatggactcaattccccaataaaaagacatagactaacagactggctacacaaacaggacacaacattctgctgcttacaggaaacccatctcagggaaaaagacagacactacctcagagtaaaaggctggaaaacaattttccaagcaaatgatctgaagaaacaagctggagtagccattttaatatcggataaaatcgacctccaacccaaagttatcaaaaaagacaaggagggacacttcatactcatcaaaggtaaaatcctccaagatgaactctcaattctgaatatctacgctccaaatgcaagggcagccacattcattaaagacactttagtaaagctcaaagcacacattgcacctcacacaataatagtgggagacttcaacacaccactttcatcaatggacagatcgtggaaacagaaactaaacagggacacagtgaaactaacagaagttatgaaacaaatggacctgacagatatctacagaacattttatcctaaaacaaaaggatataccttcttctcagcacctcatgggaccttctccaaaattgaccatataattggtcacaaaacaggcctcaacagatacaaaaatattgaaattgtcccatgtatcctatcagaccaccatggcctaagactgatcttcaataacaacataaataatggaaagccaacattcacatggaaactgaacaacactcttctcaatgataccttggtcaaggaaggaataaagaaagaaattaaagactttttagagtttaatgaaaatgaagccacaacgtgcccaaacctttcggacacaatgaaagcatttctaagcgggaaactcatagctctgagtgcctccaagaagaaacgggagagagcacatactagcagcttgacaagacatctaaaagctctagaaaaaaaggaagcaaattcacccaagaggagtagacagcaggaaataatcaaaatcagaggtgaaatcaaccaagtggaaacaagaactattcaaagaattaaccaaacgaggagttggttctttgagaaaatcaacaagatagataaacccttagctagactcactagagggcacagggacaaaatcctaattaacaaaatcagaaatgaaaagggagacataacaacagatcctgaagaaatccaaaacaccatcagatccttgtacaaaaggctatactcaacaaaactggaaaacctggacgaaatggacaaatttctggacagataccaggtaccaaagctgaatcaggatcaagttgaccatctaaacagtcccatatcccctaaagaaatagaagcagttattaatagtctcccagccaaaaaaagcccaggaccagacgggtttagtgcagagttctatcagaccttcaaagaagatctaattccagttctgcacaaactatttcacaaaatagaagtagaaggtactctacccaactcattttatgaagccactattactctgatacctaaaccacagaaagatccaacaaagatagagaacttcagaccaatttctcttatgaatatcgatgcaaaaatcctcaataaaattctcgctaaccgaatccaagaacacattaaagcaatcatccatcctgaccaagtaggttttattccagggatgcagggatggtttaatatatgaaaatccatcaatgtaatccattatataaacaaactcaaagacaaaaaccacatgatcatctcgttagatgcagaaaaagcattcgacaagatccaacacccattcatgataaaagtcttggaaagatcaggaattcaaggcccatacctaaacatgataaaagcaatctacagcaaaccagtagccaacatcaaagtaaatggtgagaagctggaatcaatcccactaaaatcagggactagacaaggctgcccactttctccctacctattcagcatagtacttgaagtattagccagagcaattcgacaacaaaaggaaatcaaggggattcaaattggaaaagaggaagtcaaaatatcactttttgcagatgatatgatagtatatataagtgaccctaaaaattccaccagagaactcctaaacctgataaacagcttcggtgaagtagctggatataaaattaactcaaacaagtcaatggcctttctctacacaaagaataaacaggctgagaaagaaattagggaaacaacacccttctcaatagtcacaaataatataaaatatctcggcgtgactctaactaaggaagtgaaagatctgtatgataaaaacttcaagtctctgaagaaagaaattaaagaagatctcagaagatggaaagatctcccatgctcatggattggcaggatcaacattgtaaaaatggctatcttgccaaaagcaatctacagattcaatgcaatccccatcaaaattccaactcaattcttcaacgaattagaaggagaaatttgcaaatttatctggaataacaaaaaacctaggatagcaaaaactcttctcaaggataaaagaacctctggtggaatcaccatgcctgacctaaagctttactacagagcaattgtgataaaaactgcatggtactggtatagagacagacaagtagaccaatggaacagaattgaagacccagaaaagaacccacacacctatggtcacttgatcttcgacaagggagctaaaaccatccagtggaagaaagacagcattttcaacaattggtgctggcacaactggttgttatcatgtagaagaatgcgaatcgatccatacttatctccttgtactaaggtcaaatctaagtggatcaaggaacttcacataaaaccagagacactaaaacttatagagaaagtggggaaaagccttgaagatatgggcacaggggaaaaattcctgaacagaacggcaatggcttgtgctgtaagatcgagaattgacaaatgggacctaatgaaactccaaagcttctgcaaggcaaaagacaccgtcaataagacaaaaagaccaccaacagattgggaaaggatctttacctatcctaaatcagatagggaactaatatccaacatatataaagaactcaagaaggtggactccagaaaatcaaataaccccattaaaaaatggggctcagaactgaacaaagaattctcacctgaggaattctgaaagggtgagaaacacctgaaaaaatgttcaacatccttaatcatcagggaaatgcaaatcaaaacaaccctaagattccatctcacaccagtcagaatggctaagatcaaaaattcaggtgccagcagatgctgacaaggatgtggagaaagaggaacactcctccattgttggtgggattgcaggcttgtacaaccactctggaaatcagtctggcggttcctcagaaaattggacatagtactactggaggatccagcaatacctctcctgggcatatatccagaagatgccccaactggtaagaaggacacatgctctactatgttcatagcagccttatttataatagccagaagctggaaagaacccagatgtccctcaacagaggaatggatacaaaaaatgtggtacatctacacaatggagtactactcagctattaaaaagaatgaatttatgaaattcctaggcaaatggatggacctggagggcatcatcctgagtgaggtaacacattcacaaaggaactcacacaatatgtactcactgataagtggatattatcacaaaacctaggatacccaagatataagatacaatttcctaaacacatgaaactcaagaagaatgaagactgaagtgtggacactatgcccctccttagaagtgggaacaaaacacccttggaaggagttacagagacaaagtttggagctgagatgaaaggatggaccatgtagagactgccatatccagggatccaccccataatcagcatccaaacgctgacaccattgcatacactagcaagattttatcgaaaggacccagatgtagctgtctcttgtgagactatgccggggcctagcaaacacagaaatggatgctcacagtcagctaatggatggatcacagggctcccaatagaggagctagagaaagtacccaaggagctaaagggatctgcaaccctataggtggaacaacattatgaactaaccagtaccccggagctcttgactctagctgcatatgtatcaaaagatggcctagtcggccatcactggaaagagaggcccattggacacgcaaactttatatgccccagtacaggggaacgccagggccaaaaagggggagtgggtgggtagggtagtgggggtgggtgggtatgggggacttttggtatagcattggaaatgtaaatgagctaaatacctaataaaaaatggaaaaaaaaagaactccagtccaagaaataaggcaaaacagagtttatgaaggaacaaccagtagttaagtgataccaagtgtaggtcagggaaaggaggaaccctgtgttttgttctcaaaagggtaggaaaactatttgtactataaagcaggatgtgtttctgtaggagaggatatatgaagtcagggcaacttgacttttctagtttattacatttaacagaaacttcagacttctgccacctgccctactcctggtgtgatatagtaggttaggattttacaaaccctaccaggcctctttccagagtcaaaagtctcatggccataagactgctctcaactgacagcaaatatgggtatgaggagagtaggtagtgccaaaggctttctgggtcctgtggatggagtaaggagcactgagcttttatttcctgccagggtcatgttggcatggccagtgatggactggtacctgaagtggaaacctaagggctctttggagagtcagttgtgttagatggtgttttgctggggaaaacatatgaaggagtgttttcctgacgtggacaccggtgaaagactaaagcagacttctgaagaaacgtttcactgaagcagacacaggagagaggctgttctgctacagcaatcacgtgaaaggacacatgatgaaggattctttgctaacaaagtgcatgcattggtccgccttatattgcgtggatgagctccatttttcgggactccatagactcaggctgactacattcaggtgctgaggcaaaactggtgctgagcaaggcacatgaaggacatgtgatgtttagagggtataaataccattcaacagagtgactgagtgatggagaaaaagcttggcttgctggtacaatgcctgtgggtcgcacaacttcactgatctttgcttccctgagagaggcacagctgagaatttctggtgctgctgttggtcccacctgcagacttgagccaaggctgaggcctagctgtctctgctaggtcatgtcaccactgttgctaaccttactctaccgaactagactgctggtgtatccataaagtgtttgcaaatggaaaaaaaaaagaaaaaagaaaaattaaccactagatttattgctcggcaaaattgtttttgtgaatcaaaataggctaggaaaataaaatgggagttaaaactaaaaaaaaaaaaaagaaatatggaaagtacaatcaaacaagtgaaggatatgaattacattgtccaagaaatgaaaatggaaatagaaacaataaagaaaacacaaactgaggaaatccttgaggtggaaaatataggaaagagaagaggataactataggcacaagcaacagaatagaagagatggaagagagaatagcaggcatagaagatacaatgggaaaaatcaatatgtcaatcaaagaaaatgcaaaatctaaaaaagttcatgacacaaaacatccaaaaaacttggtacactatgagaataccaaccctaagaatagtaggaacaggagaaggagttgattcccagatccagaacacatgttcaacaaaattatagaagaaaatctccctaacctaaagaaggagatggctataagggtacaagaagcttagagaacaccgaatagattagaccaggaaagaaaatccccaccaccacataatcctcaaaacactaaatatacagaaccagaaaaagaatattaaaagccacaagggaaaaatgccaaggaatatatatataaaggcatccctatcagaattacacccaacttctcaacagagactctgaaaacttgaagaccctggtcagatgtcttgcagaccctaagagaccatatatgtcagcccagtctactacagccagcaaaaaaaaaaaaaaaaaaaaaaaatgtatttcgagacagggtttctctgtatagccctagctgtcctggaactcactttgtagaccaggctggccttgaactcagaaatccacctgcttctgcctcgcaagtgctgggattaaaggcgtgcgccaccgcacctggccagcaaaatttttaatcaccatagatggaggaaccaagtcattccatgaccaaaaaaaaaaaaaaattaaacaattttctcactaacccagccatacaagaattagtagaaggaaaacaccaacccaatgaggctaaaacgttttccaagcaaacagacccaaaaaacaagctggagtagctattctagtacctaacaaaatagactttcaaccaaaaataaacaaaagatatggggaaggacactttatactcatcaaagaaaaaaatccaccaagaggacatctcaattctgaatatctatgccccaaatgcaagggcacccacatttgtaaaagaaacattactgaagcttaaatcacacattgaatcccacccattatagtaggagacttcaacaccccactctcaccagtggacaggtcattgaaacagaactaaacagagaaataatgaaattgatggaggttatgattcaaatggacctagcagatatctgtagaacatttcacccaaacacacacacacacacacacacacacacacacacacacacacacacacacacacacaaataccttcttctcagcacctcatgcataaagaaagccttaacagatacaaaaaagattgaaatagccccttgcatcttatatcactgtcgattaaaactggacttcaacaataacagaaacaacagaaagcctacatattcatggaaactgaacaactttctactcaatgatcactgggtcagggaagaaagaaagaaagagaaagagaaagggaaagagagagagagagagagagagagagagagagagagagagagagagagagagagaggaaggaaggaaggaaggaaggaaggaaggaaggaaggaaggaaggaaggaaggaaggaaggaagaaaggaaggaaggaaggaagaaattaaagactttctagaattcaattaaaataaaggcaggcatatccaaacttatgggacacaatgaaaatagtgcaaagaatgaaattgatagcactaagcaccttcataaataaaatggagagttcttatactaatgatctaaaagtgcacctaaaagcttgagggggaaaaaagcaaacacatccaacaggagtagatggcaggaactaatcaaactcaggactgaaatcaatcaattagaaacaaagagaaaaatagaaagaatcaaaaaactaggagctggttctctgagaaaatcaaggagacagacaaacccttaatgaaattaactaaaaggcagagaaacagtacccaaattaacaaaatcataaatgaaaagggaagcataacaatatacactaaggacatccaaagaatcattaggttttacttcaaaaaactgtattccacaaaattggaaaatctaaaagaaatagatgattttctagacagatacacattataaaagttaaatcaagatcacataaactatctaaacagtcctataacccataaggaaatagaagcagtcattaaaagtctcctaacccaaaaaatagaccaggatcagatggggttagtgcagaattctatcagactttcaaagaagagctaacaccaatactgctcaaactgttcaacaaaatagatacagacagaacactgccaaatttattcaatgaggccacagtcaccctgatacccaaactacacaaagactcaacaaaggagaatttcagaccaatttcccttatgaacattggtgcagaaacactcaataaaatacttgctaacaaaacccaagaacacatcaaaaacatcatctgccatgatcaagtagacaaagcaaaaatgcaaggatggttcaatatacaaaaatttgtattccataatataaacaaaccaaaagaaaaaacacatgatcatctcattagattctggaaaagcctttgacaaaatccaacacctcttcttgttaaaaatcttggagagatcaaggagacatactagaggcaatatacatcaagccagtagcccacatcaaatgaaatggagagaaatttaaaacatttccactataatctgggatatgacaagactgtctactctctatatacctcttcaatatactccttaaagttctagctagaacaataagataactagtgaagatcaaggggataaaaattggaaaggaagaaatctaagtattactattcacagatgatatgatacattacataaatgactccatacatcttaccagagaactcctacagctgataatcaccttcagcaaagtgactggatacaaaattaaactcaaagaaatcagtaagcctcctttatacaaataataaatgggctgagaaagaagttagggagacagcaccttttacaattgcaacaaataatataaaataccttggtgtaactcttaccaagcaagtgaaagacctgtatgacaagaacttaaagtctctgaagaaagaaattgaagaagatatcagatgatgggaagatctcccatgcttatggagtgctaggattaacatcgtgaaaaaggccatcttaacaaaaacaatctatacactcaatgcaatatgtatcaaaattccaacacaattctttaaagaccttgaaagaacaattctaaacttcatatggaaaaaaacagggtagctaaaacaattgtgtacaataaaagaacttctgaaagtatcaccattcctgacttaaggctgtactacagagcaatagtaataaaaaccgcacagtattggtatagaaacagacaggttgatcaatggacgcgagttgaagacccagaaataaacacagacaactacagacacttgatttttgacaaagacaaaaccatacaatggaaaagagagagcatcttcaacaaactgtgctgttctaacaagacatctgcatatagaagaatgcaaatagatctatatttattacattgcacaaatatcaattccaagtggatcaaaggccacaatttaaaacttagtacaccagacctaatagaatagaagagtgggggataatcttgaactcattgtttcaggagtcaacttcctgaacagaacagcagtggttcaggtcccacaatcaacagttgataaataggacctcataaaactgaaaagcatctataagtcaaaggggattgtcagtaggacaaaatgtcagcctacagattaggaaaagatcttcaccaaccctacatctgacaaagggctagtatgcaaaatatataaagaactcaagaagttagacaccaataattcaaataacccaatttaaaaaggaatacaaagctaatcacaaatggccaaaagacacttaaaggaatgttgaaagtccttagtcatcagggaaatgcaaattgaaatgactctagggttccaccttacacccatcggaatttctaagatcaaaacccccaaggggcagcctcagcctcagcagcagcggtcgccatctgggttccgggactaagcagaacttaggaaattagtctgaacaggtgagagggtgcaccagagaaccggacagcttctgggacaggcggaagcacagagccgctgaggcagcacccttggcgggctgcagacagccggccaccgtccggaccagaggacaggtgtccacctggctcgggaggctgcctcagcctcaggagcagcggtcgccatcttggttccaggactccctggaacttaggaatttagtctgcacaggtgagagtctgcaccacagaagctgacagcttctgggaactgccaaagcaacacagcttctgagaaaggccctgttttgggccttcttcttcgaccaggaagaggtccaaaaacaagatatctgcgcaccttccctgtaagagagcttgccagcagagagtgctctgagcactgaaactcagaggagagaatctgtctcccaggtctgctgatagacggtaacagaatcaccagaagaacaatctctaaacagagtcaactataactactaactccagagattaccagatggcgaaaggtaaacgtaggaatcctactaacaggaaccaagaccactcaccatcatcagaacccagcactcccacttcgcccaggccagggcaccccaacacacccgaaaacctagacctagatttaaaagcataactcatgatgatggtagaggacatcaagaaggactttaataaatcacttaaagaaatacaggagaacactgctaaagagttacaagtccataaagaaaaacaggaaaacacaatcaaacaggtagaagtccttatagaaaaacaggaaaacacatccaaacaggtgatggaaattaacaaaaccatactagacctaaaaagggaagtagacacaataaagaaaactcaaagtgaggcaacactggagatagaaaccctaggaaagaaatctggaaccatagatttgagcatcagcaacagaatacaagagatggaagagagaatctcaggtgcagaagattccatagagaacatcggcacaacaatcaaagaaaatggaaaatgcaaaaagatcctaactcaaaatatccaggaaatccaggacacaatgagaagaccaaacctacggataataggagtggatgagaatgaagattttcaactcaaaggaccagcaaacatcttcaacaaaattattgaagaaaacttcccaaatataaagaaagagatacctatgaacatacaagaagcctacagaactccaaatagactggaccagaaaagaaattcctcccgacacataataatcagaacaacaaatgcactaaataaaaatagaatactaaaagcagtaagggaaaaaggtcaagtaacatacaaaggcaagcctatcagaattacaccagatttttcaccagagactatgaaagccagaagagccgggacagactttatacagacactaagagaacacaaattccagcccaggctactatacccagccaaactctcaattaccatagatggagaaaccaaagtattccacgacaaaaccaaattcacacattatctctccacaaatccagcccttcaaaggataataacagaaaaaaacaatacaagaatgggaacaacgccctagaaaaaacaagaaggtgattcctcaacaaacctaaaagaagacagccacaagaacagaatgccaactttaacaacaaaaataacaggaagcaacaattacttttccttaatatctcttaacatcaatggtctcaactccccaataaaaagacatagactaacaaactggatacacaaacaagacccaacattttgctgcttacaagagacacatctcagagaaaaagatagacactacctcagaataaaaggctggaaaacaattttccaagcaaatggtatgaagaaacaagctggagtagccatcctaatatctgataagattgacttccaacccaaagtcatcaaaaaagaaaaggagggatacttcatactcatcaaaggtaaaatcctcaaagaggaactctcaattctgaatatctatgctccaaatacaagggcagccacattcattaaagaaactttagtaaagctcaaagcacacattgcacctcacacaataatagtgggagacttgaacacaccactttcaccaatggacagatcatggaaacagaaactaaacagggacacactgaaactaacagaagtgatgaaacaaatggatctgacagatatctacagaacattttatcctaaaacaaaaggatataccttcttctcagcacctcatggtaccttctccaaaattgaccacataataggtcacaaaacaggcctcaacagattcaaaaatattgaaattgtcccatgtatcctatcacatcaccatgcactaaggctgatcttcaataacaaaaaaaaaaaaaaataccagaaagccaacactcacgtggaaactgaacaacactcttctcaatgataccttggtcaaggaaggaataaagaaagaaattaaagactttttagagtctaatgaaaatgaagccacaacgtacccaaacctttgggacacaatgaaagcatttctaagagggaaactcatagctatgagtgcctccaaaaagaaacgggagagagcacatactagcagcttgacaacacatctaaaagctctagaaaaaaaggaagcaaattcacccaagaggagtagatggcaggaaataatcaaactcaggggtgaaatcaaccaagtggaaacaagaagaactattcaaagaattaaccaaacgaggaggtggttctttgagaaaatcaacaagatagataaacccttagctagactcactagagggcacagagacaaaatcctaattaacaaaatcagaactgaaaagggagacataacaacagatcctgaagaaatccaaaacaccatcagatccttgtacaaaaggctatactcaacaaaactggaaaacctggacgaaatggacaaatttctggacagataccaggtaccaaagttgaatcaggatcaagttgaccttctaaacagtcccatatcccctaaagaaatagaagcagttataaatagtctcccagccaaaaaaagcccaggaccagacgggtttagtgcagagttctatcagaccttcaaagaagatctaattccagttctgcacaaactttttcacaagatagaagtagaaggtactctacccaactcattttatgaagccactattactctgatacctaaaccacagaaagatccaacaaagatagagaacttcagaccaatttctcttatgaatatcgatgcaaaaatcctcaataaaattctcgctaaccgaatccaagaacacattaaagcaatcatccatcctgaccaagtaggttttattccagggatgcagggatggtttaatatacgaaaatccatcaatgtaatccattatataaacaaactcaaagacaaaaaccacatgatcttctcggtagatgcagaaaaagcatttgacaagatccaatacccattcatgataaaagttctggaaagatcaggaattcaaggcccatacctaaacataataaaagcaatctacagcaaaccagtagccaacatcaaagtaaatggagagaagctggaagcaatcccactaaaatcagggactagacaaggctgcccactttctccctaccttttcaacatagtacttgaagtattagccagagcaatttgacaacaaaaggagatcaaggggatacaaattggaaaggaggaagtcaaaatatcactttttgcagatgatatgatagtatatataagtgaccctaaaaattccaccagagaactcctaaacctgataaacggcttcggtgaagtagctggatataaaattaactcaaacaagtcaatggcctttctctacacaaagaataaacaggctgagaaagaaattagggaaacaacacccttctcaatagtcacaaataatataaaataccttggcgtgactctaactaaggaagtgaaagatctgtatgataaaaacttcaagtctctgaagaaagaaattaaagaagatctcagaagatggaaagatctcccatgctcatggattggcaggatcaacattgtaaaaatggctatcttgccaaaagcaatctacagattcaatgcaatccccatcaaaattccaactcaattcttcaacgaattagaaggagcaatttgcaaattcatctggaataacaaaaaacctaggatagcaaagactcttctcaaggataaaagaacctctggtggaatcaccatgcctgacctaaagctttactacagagcaattgtgataaaaactgcatggtactggtatagagacagacaagtagaccaatgaaatagcattgaagacccagaaatgaacccacacacctatggtcacttgatcttcgacaagggagctaaaaccatccagtggaagaaagacagcattttcaacaactggtgctggcacaactggttgttatcatgtagaagaatgcgaatcgatccatacttatctccttgtactaaggtcaaatctaaatggatcaaagaacttcacataaaaccagagacactgaaacttatagaggagaaagtggggaaaagccttgaagatatgggcacaggggaaaaattcctgaacagaacagcaatggcttgtgctgtaagatcgagaattgacaaatgggacctaatgaaactccaaactttctgcaaggcaaaagacaccatcaataagacaaaaagaccaccaacagattgggaaaggatctttacctatcctaaatcagataggggactaatatccaacatatataaagaactcaagaaggtggacttcagaaaatcaaataaccccattaaaaaatggggctcagaactgaacaaagagttctcacctgaggaataccgaatggtagagaagcacctgaaaaaatgttcaacatccttaatcatcagagaaatgcaaatcaaaacaaccctgagattccacctcacaccagtcagaatggctaagatcaaaaattcaggtgccagcagatgctggcgaggatgtggagaaagaggaacactcctccattgttggtgggattgcaggcttatacaaccactctggaaatcagtctggcggttcctcagtaaattggacatagtactactggaggatccagcaatacctctcctgggcatatatccagaagatgccccaactggtaaggacacatgctccactatgttcatagcagccttatttataatagccagaagctggaaagaacccagatgcccctcaacagaggaatggatacagaaaatgtggtacatctacacaatggagtactactcagctattaaaaagaatgaatttatgaaattcctaggcaaatggatggacctggagggcatcatcctgagtgaggtaacacattcacaaaggaactcacacaatatgtactcactgataagtggatattagcccaaaacctaggatacccaagatataagatacaatttcctaaacacatgaaactcaagaaaaatgaagactgaagtgtggacactatgcccctccttagaagtgggaacaaaacacccttggaaggagttacagagacaaagtttggagctgagatgaaaggatggaccatgtagagactgccatatccagggatccaccccataatcagcatccaaacgctgacaccattgcatacactagcaagattttatcgaaaggacccagatgtagctgtctcttgtgagactatgccggggcctagcaaacacagaagtggatgctcacagtcagctaatggatggatcacagggctcccaatggaggagctagagaaagtacccaaggagctaaagggatctgcaaccctataggtggatcaacattatgaactaaccagtaccccggagctcttgactctagctgcatatgtatcaaaagatggcctagtcggccatcactggaaagagaggcccattggacacgcaaactttatatgccccagtacaggggaacgccagggccaaaaacggggattgggcgggtaggggagtgggggtgggtgggtatgggggacttttggtatagcattggaaatgtaaatgagctaaatacctaataaaaaatggaaaaaaaaaaaccccaagggacagcacatgctggcgagtatatggagcaagtggaacactcctacattgctggtaggagtgcaaacttatacaaccactctggagatgatttggcaatttctcagaaaagtggaaataattctacctcaagacccagctataccactcctgggcatatacccaaaatatgctccaccatcccacatggacacataattaattatgttcatagctgctttatttgtaatagtcagaaattgtaaacaacctagatgtccctcaactgaagaatggattgtgggaagccgttgcagagtggcagttgcagagtggcagttggctactgctggccaccacacatacataggcagtgaaggttcttttgccaagatgagagacaagttaaccaatcagatgagagacaagttaaccaatcagatgtgagacacgcctcccctaggcctatataagcagcaccagttctgggctcagggtcttttagccactacaatcaagctctcccaataaacgtgtgcagaaggatcctgttgcagcgtcgttcttcctggccagtcaagcacgcgcaagaatggataaagaaaatgtggttcatttacacaatagaatactattcagccattaaaaacaataacatcatgagttttgaggcaaaggcctagaactataaaatatcatcctaactgaagtaacccagacccaaaagtacatgcatagcatgtgcgtacttataagtggatattatccagaaagttcaggaaaaccatgctataattcacagacccaaaagaagccaaataacaagcatggtacaagataagatagttgaatcctcctctgaaggtgaaataaaatagatattaaagatggatggagggaagtaaaggggtgggagagaggaggatgaggatgagaaggagggggcatcagatgtaggaagagcaggggagacaacagaaatcagtattgggcaggggtgggcttctctaggtcatgccagagactgggatgaggaggaaggccccaaggtgttataagggtactataggtgctgagactcctaacagtgggggatatggattctgaaatggtcacttcctgtttccatccaggactcctagaggagggataaggacagcaatccacccacaaacgctttgacccaaaatatgtccagcctataagatgtgcaaggacaaagagcagtctgaaggaatggccaaccaatgactggccaaaattgagacccatcccatggccaagaaccaattcctgacactattaatgatactctgttatgcttacagataggagcctagcaaggctgtcctctgagaggctccatgcagcagccagtggaaacagatacagaaactgacagtcaaacactaggtggaggtaggggaatcttgtggaagagctggaaaaaaggattgaagaacctgaatagggaagagactccatacaaagacgagagagtcaactaacctggacccttatgggttcccagagactgaaacaccaaccaaagagtgacctgtggcccgtcccccagcacatgcgtagcagaagtgcagcttggtcttcatgcagatccccccaacaactgaagtgcagggccgttcctgaatctattgcctgcctatggatcccattcccctagatgggctgcctcatctagcctcaggagagaggatgtgcctaggcttgcagtgatttgatatgttggggggattgtgcagggtgactcctcctcagaggaaaagcagaggtgggaacaagaataggatctgtgtgaggggatactgggagagggtcttatattgagatgtaaaataaataaatcgataaaaaacagctaaaaataaaaaagatgaaaagcacaatgacacaaattgtttggattctatacattgccgttttaaattacttaaagagagaaacagaagataaagggataaatgacctaagtaaaactgacacattactaacgatgattattatcatgggtagttcttattccaatcttgataaccacaatgactttttataccttctcaaagaaaaggcctttagagatagaaaaacgagagaaatgtgcataatggcaacaagccttagaagaaaaattataagtaaaaatgaagaagatacttaacaatagagaaaagagagatatgaaaatagagttagtaaaatattaaaatactctaaggagtgtccagaagaaaaatttttaattttcttaaaaattaaaggagaatttcaattataataaaaatgtgaaatatactaaaatagtacagatacaagaaaaagaaaaatataaaatatggagacaatccatagaagaaaatttatttttaaaatattttttaagttgagaaagatactaagatagagacagaaggggtaagacttgagtctactagattatcacataatgaaaatccagaaagtcagccaaaggttgttagaaaactggccttagctttttcagttactgtacaacaaatgccaacagatgctagctaggcactttcaagattatgaagaatttacatatcatcccatagaaatgctagattttaaaaaattgcaggatgcaacattaatagaaaaaataatctctaaacatttttaagaaaagccaaagtttcaaatgttttaattgtgacaagcaaggtcatttaaaaagggattgtagacaagcaatccctacaaacaatgtttcttcctagagataatccaaaaagaagacacaagccttctggaatatgcagaaggtgtagcaaaggccagtacttgcctaatgaatgtagatcaacaaaggacaaacaaggtaatcctttgttgggaaatgtctcaagaggccccaatatcaaattcaagtcagtcatctcaggactgaaatggttgaattcatttctgcagaacatttaaacaacactgctctgaatatagatattaataaccaagatatcaaagccagagcagcatatgtgtgtatgtatgtgtgaatatatataatatgtgtgcattatatacatacatacatacatacaactcaggagagactgaaaaagaagtattttgaaaactgatataaatgataagaaaccaaaattgaaattacagttagacagagttgtgattgaaggattgatggatacaggagcagatgtaatcacaagattcctggagtccaccttggtcattttgaagggtatctacacagctcccaagtgttggtacattgtctcaagtaaaacaaagtctaatatggattaagtgcatagaaacagaaagtaaaatagaaaaattaaggccacttatggttaaaaatacttcagatataaactaatataatcagacaatatgatgaattaagaatacagattctgttcaataatactaccttagaacaatatcatacaataggtatgtgtttgattttgtagtttggagaattaagatatgtacatatgttcaaatatcataaaatttatacttctgcaagatttttccatttgtttgtttgtttgtttgtttgtttgtttgtttaaaactccagattttattccccttccggtccacccttcacatgttccaccacccatacctcctccctgccccctgtctccaccaagatgtcaccaccccccatcccccacccccacccccacccccacccccacccccaacctctaaactccctggggcctccactctcttgagtgttaggtgcatcttctctgactaaacccagaacttgcagtcctctgctgtataggtgttggggggggggggtctcatatcagctggtgtatgctgcctggttggtggtccagtgtctgagagatctcaggggtccaggttaattgagactgctggtcctcctacagggctgctctcctccttagcttctttcagctttcccctaattcaaccacagtggtcagcagcttctatccattggttgggtgcaaatatctgcctctgcctctttcagctgctttttgggtcttttggaggacagtcatgatagacccctttttgtgagcacaccatagtctcattaatagtgtcaggccttggggccccccttgagctgatcccaatttgggcctgtcaatggacctccttttcctcaggctcctctccatttctatccctgcagttctttcagacaggaacaattatgggtcagagctttgactgtgggatggtaattccatccctcatttgatgccctgtctttctgctggagatgggctctacaaggtccctctccccaatgtagggcatttcatctaaggtccctccctttgagtcctgagagtctttcacctcccatgtctctggtacattctggagggtccccccaacctcctagctcccgaggttgcctgtttccattctttctgctggccctcagggcttcaattcttttccctcacccaatactagactttccctcccagatccctccctccctccaatcttgtggttgctttcttctccctcccaagtgggactgaggcatcctcacttggacctttcagcttgttgacctttgtgagttctgtggactgtatcttggataatctgtacttttttggctaatatccacttattagtgagtacataccatgcatgtccttttgggtctgagttacctcactgaagatgatattttctagttccatccatttgcctgtgaaattcaggatgtcctcattcttaatagctgagtagtatttcactgtgtaaatgaaccacattttctgtaaccattcttctgtcgtggaacatttgggtgtttccagcttctggctatcacaaacaaggccattatgaacatagtggaacatttgcccctctggaatggtggagcatcttttgggtatgttcccaagagtggtactgctgggtcttcaggtagatctatttcctattttctgaggaacctccggattgctttccagagtggttgtaccagtttgcaatcccaccagcaatggagtagtgttcttctttctccacatccttgccaacatgtgctgtcacctgaggttttgatcttagccactctgattggtgttgggttgaatctcagggtcgttttgatttgcatttctctgattactaaggactttgaacatttctttaggtgtttctcagtcattcaagattcctctgttgtgaattcttggtttagttctataccccattttttgattgggttgtttggggtgtttgtttgtttgtttgtttgtttgtttgtttgtttgtttgtttgttttggggggtggttagcttcttgatatgtttctcccttgagctctaataagttgattctgaaattaaacatttattagaggagatgaaaatcttagaaatgcatttgcagattaaaactgacaatggtccaacatatgtctctaataaaatgaaacaaattttgtatattataatataaagcatgctacagatataccacacaatcctacaggacaagctgttatttgagagacctaattgtactttaaaagagatgcttaataaacaaaagagggtaataaagactcccagagataaattacatagtactttgctaagtttaaatttttaaaatgtcaattagattacaccactgctaaaataaaatacactggattttagaaaggactgatgatgatgatgatgatgatgatgatgatgatgatgatgatgatggtggtggtggtggtggtggtggtggtgtgtgagtgtctgtctgtgtgtgtgtgtgtgtgtgtgtgtgtgtgtgtgtgtgtgtgtgtgtgtgtgtcttagtcagagtatctattcctgcacaaacatcatgaccaagaagcaagttggggagaaaaaaggtttattcagcttacatttccacattgctattcaacactaaagtaagtcaggactgaaactcaagcaggtcaggaagcaggaggtgatgcagaggccatggagtgatgcctcttactagcttgcttcccctggcttgttcagcttgctctcttattgaacccaagactaccagtccaggatggcaccacccacaatgggccctgagaaaatgccccacagctggatctcatggaggtacttccccaactgaagcacctttctctgtgataactctagcctgtgtcaagttgtcacacaagaccagccagtacagtgtgtgtgtgtgtgtgtgtgtgtgtgtgtgtgtgtgtgtgtgtgtgtgttataactttagaatgaaagagaggaaatgttttacattggagaagagcttttgtctttttcaacaggagaagaaaatataaggatccatgaaggtcttggctgcagactaagaaagaaatcaagaaaacaaacgaagaaggtaaaatgatttgcttatcactctacatggcaacaactctgggactagctgagacatgaaaacatttccagccaggactccagctaagcatattcaataagtcttgttggctgcagaatcctcaggtagtatagtgccatcctttcaaatgaataaaaaaaaatacaatttggttatacaatccaaacaaactcataaaggcaagtcagatgccttacctgctcaaaacagagcatagaatcctctttagctaaattgtgcacattgcacattccatatatgtgttaatgcagaagtgtatgttgcctatgaaagtttatatgttcacagaaaaaaaaccaatcagacaccaatgaagttaaagcagccctggcaagattaaccttgagataaaagaacctctggtggaatcaccatgcctgacctaaagttgtactacagagcaattgtgataaatctgcatgttactggtatagtgacagacaagtagaccaatggaacagaattgaagacccagagatgaacccacacacctatggccacttgatctttgacaagggagctaaaaccatccagtggaaaaaaagacagcattttcaacaaatggtgctggcacaactggcagttatcatgtagaagaatgagaattgatccattcctatctccttgtactaaggtcaaatctaagtggattaaggaactccacataaaaccagagacactgaaacttatagaggagaaagtagagaaaagcctcgaagatatgggtacaggggaaaagttcctgaatagaacagcaatgtcttgtgctgtaagatcgagaatcgataaatgggacctcataaaattgcaaagcttctgcaaggcaaaagaaaccgtcaataagacaaaaagacaaccaaaagattaggaaaagaactttacctatcccaaatcagataggggactaatatccaatatatataaagaactcaagaaggtggactccagaaaatcaaataaccccattaaaaaatggggctcagagctgaacaaagaattctcacctgaggaataccaaatggcagagaagcacctgaaaaaaatgttcaacatccttaatcatcagggaaatgcaaatcaaaacaaccctgagattccacctcacaccagtcagaatggctaagatcaaaaattcaggtgacagcagatgctggcgaggatgtggagaaagaggaacactcctccattgttggtgggattgcaagcttgtacaaccactctggaaatcagtctggcggttcctcagaaaattggacacagtactaccggaagatcccgcaatacctctcctgggcatatatccagaagatgtcccaaccggtaagaaggacacatgctccactatgttcatagcagccttatttataatagccagaagctggaaagaacccagatgcccctcaacagaggaatggatacagaaaatgtggtacatctacacaatggagtactactcagctattaaaaagaatgaatttatgaaattcctaggcaaatggatggacctggagggcatcatcctgagtgaggtaacccaatcacaaaggaactcgcacaatatgtactcactgataagtggatattagcccagaaacttaggatacacaagatataagatacaatttgctaaacgcatgaaactgaagaacgaagaccaaagtgtggacactttgccccttcctagaaatgggaacaaaacacccatggaaggagttttgagacaaaatttggagctgagacaaaaggatggaccatctagtgattgccatatccagggatccatcccataatcaacttccaaacgctgacaccattgcatacactagcaagattttgctgtaaggacccagatatagctgtctcttgtgagactatgtcggggcctagcaaacacagaagtggatgctcacagtcagctattggatgggtcacatggcccccaatggaggagctagagaaagtacccaaggagctaaagggaactgcaaccctataggtggaacaacaatatgaactaaccagtaccccggagctcttgtctctagctgcatatgtatcaaaagatggcctagtcagccatcactggaaagagaggccctttggacttgcaaactttatatgccccagtacaggggaatgccagggccaaaaagggggagtgggtgggtaggggattgggggggtgggtatgggggacttttgggatagcattggaaattaaatgtggaaaatacctaatttaaaaaaaagattaaccttgagcctgctgtaaaggatattgagatgctgatacatattcattccagcattctgcatggtcctactgcagactgcctcaatactgttttctcaaaaatctacattagagacaatttcaaaatggctagctagattgtccagcatggcagactgttacagccaggacttcatttaagccctgcattttcacaccatacagagcctggacaaaataatgttacagctagctttcttttttttttaattaggtattttcctcatttacattttcaatgctatcccaaaggtcccccatacccacccccccaatcccctacccacccactccccctttttggccctggcgttcccctgtactggggcatataaagtttgcaagtccaatgggcctctctttgcagtgatggccgactaggccatcttttgatacatatgcagctaaagacaagagctcccggactggccaatatcccaattttctttgggctcccaaaagaatttgatgaccccatcagacagcaggaagcaattttaagagaatgatgtcccattcccaaaaagcagggtaggagggttttggtcatttggtgggtaagttgttaatggtcttggtcagggaagagacaaagttagggaagtttctttttctctttctttttctcttctctgtccttctttctctcctatctagtgctaaagggagtaaaggaggagaagggatgtaaagaaaaaatggggagaagaataaaaggaaaaagggggatataggaatgataaattaaagggcagattattgaatctactattggaccaaagagcattaataaacttaacattttacattttgtatgaactttgtataatgatacagatttaagattatattttgttactacatactatataaatgtttcaactcttgtttaagctattgtaccaattgaaactcaaaatgcaatataaagttctagtccttttgaaagctgctattacaaattgtttaggataattaagaaatgcaagttagtagttagtcaatcaaacttatgttcaacttaggtaatagtttagttaactacaaaaataagcttcatttagctcccaaagatcttttcaaagttaagcaaatagtagacagctagaaacaagcaatgtttgcccgtacagatatactatagacagatagatggtcttcaaaacctcaaagatccacagaacgtagcatttaaagatgttttaacataaggcttttcatggcagtgagacatgtctgcttctggcagcactcccattctactttaaagaagattgtgagtattgaagaaccttcatatgaagtttgtttctgtgtgacaagctagccactgggcaagaaactgtccttgcctcaattgctgacagaatgctgcccaagatgtggacaagcatgaagaaagttgactgctgaccttggcaaggcaagcaagtccttcaaaattcctgcttcacagaaaaatctgtcatattctgggccaaaggctgaagatgatgctccaatgacacagagaaactttgggtgactgtccaggcaacctgcctcctctatcatttctatagttttggaagttgcttgctctgcatttcctgcatacttgagaagctaaagtggccctggcaaaattaaccttaaggatgctgtaaggatgctgagatactgagacatatttatcccagcatcctgcttggtcctactcagactgccttaatgctgtttcctcaaaaatctgcatctaggacagatatacataataaacatataatctatatctcttatatacaagacaaatatagtaaatattataaagtaatatttattccttttcaggtctctgatgggattgaagactagatcattatagtctcacaattaagcttaaattgtttaggatttaaggtctaagaagatgtttataggttgataaatgcatgttatgatagaaaatgatttgggtaaagaactttgaattcagtaagataggttagataatagagcactttctccaaggttgccaaatgcatgtggcctggatattgtgaatgtaattcttacctaatagttttcataagtgttattattgtgtaaagtttattgatgttggagaaagagccttttattgaactaaaagggggtgatgcagggataatctgtgctctctgtgtcacctgtcaatcaaaagatgatggactattatcaaaagacaggaagtagatggtgagagttctgggagagtgactggaactctggtagtcagaggtgggagcttctcctcagaccctgaggaagtcaggtgcatgaaaatgaggaaaggtaactagctttgtgaacaactcagaatagtttaaatggttatatgagttaccagctagtcggggaatgagccaaagcttatgacctaagcatttattcataaattaatgggtacctgagtcattatttgggaaaggggggcaaagaaaaccccccagatttacttttgcaccaagtgttatcatgacttgataaatttctttcctgctagtctgtatactgtttttctctgaaaacacttttatttctcctgcccatagtttttccagacaaaatctctgagaataaaagtgtggttataactatattttgggaagactataagaacaaattaatatttttcataccgtgatcataatacctgagaaaagcaacttacagaagtgaagaaatgttttagcttatggtttcagaggattctagcaaagaaaaacctaacagagctatgcaatgcatgcgcatgggatgtgtaacatggctatgggtaagaaagcaaaaataagccaggaccacagaccatgcatgtacaaccttcaaaggttggctcctattgatatactttcccaagaaagtcacacatcttaatgggctcactgcttctcaaaatagctggggacagatattctgtaggaggcatgagggtctttatactcaaaaataagaattaggagaaccttgaatgttaaacacacagggttgttcctccagggaaggaatacataacctgttgccctctaagaaggctgggagttggcatgcttaatagcacagtgacctttacactacctgtgtggctggagatctttccagcaccagatcctctcccaggtccttatcatacatgtatttgtttcagtcaatctaaagaaactatttttattgacttcataaagagttttgatgtagtcacatctgatatgtatttagctggctttgttcctcagagagatgcgtgtatgctctgttgtgcacacaggactgagtaaattttcactacagtaagttttgaccaatttgggctgtgcttaaacctgcctaaaataaactccttggagtcagactccagaaatttaaatcaacaccagccattgagttgtgttggaacaaatttccttctagccttcttgggatcatctttttgatggctgtgaaggtcacagagacctccaaattattctaatcatgagtttgtgggggacatttttaattaggtggataaaattgcaacacattattttaaacacatctggcacttggggaggtacgttggagaatcctactattaagatcaccgtcccccatgtccagatggctctccaagctcagaacaaaatggatgactccctttctcagaggggcttccctttctctgctagactttgtctggagagggtccctgaacacaggtgcctgttcttaagaatagccttgtgcagagctctctgaaaaccctgcataattcagcatccatgtcccactctggcttcctacccacatgataattaggtactgtattatgaccaatttgctttttccacccatacccctgaaagcccttatctaccctattcctggaactgcagtggtctctggaagcccttccatcttacagccatcagaaccctgcttattgattctgctccctttgtcttatcagtgggtggccaatggcctctgaggaaaagggagacccacagaggtacagacaggaactagagtattagtgatggttgttttttgtgttattggaaattttgcctaattcatagaaagtgttggtatttccttttaaagactctgaatccaaaagttcactgattctaccctcacacatgagtgagtgctgattatgagacgggtgagggacagtttcagatgcacacactctttgatatcattacgagaaaagttgtttagaactgattgcttcaggaactttctctcaaaccaatagtgagctgataaacttgaagtaagtgtttccacagtgtgaggccaaagtagaagcctttccagccttatgacccggctgtgaataatcctggctaaaaatggatgaaatccttctctgtgtgttgttgtgtgtgcgtgtgtgaagtgtgtgcacaagtgtgtgtgtgtgtgtaggccaagagtccacctcagatgtccttttctgttggtttctgtattatattttgagacaaactctgtcattgaccttggtattctctgactaaagagctacacctctaccccatcccacccacagcattagggctataaatctatgtttccatgctcacacattgctaggtatccaaattcaggttctcagactcaagctttaatggctgaataagctgtccaaccctgtacatgtccttcttaagctattttaacctggctctagaagtaccatctgtctgcttcagagctgaatttcttacttaggagctgtggtgaattgaatgaaaatggccctcataaactcgtatgtttgattttttgattaccagttggtggactgtttagaaaggactagaatgtagtggctcattgttggaagtttgtcactaaaggtgagctctgctgtacaaaagatgttggtcattggggctgaaaactgagctgtaattaagtagtcttctaggaagtgtttccttggggtcagtacacagtattccaggagtaaccttgtgttcttagccaaacttggtagtataagagtcaaccaagtggtactggttttaaagtcataaaggggtcatggagataaagtaaggattagtactgtgtggcagcactggagttcctaaagagagcccaggagagtgcagcccagttgcaacaagaggccccagcattctggaaatgcaagtcccatgagataactaccaaaaacaacagcaaagatgtgtggagacagccaaaatctagaagacaagctgtatgtgctgcagaaagtggagcaagagaagtggccaaagccctttggaggatcccagaagatcttgagtgaatcccaaacattaaacattgagttttttacacagttgggagtttggttttgctttgattttattgttacagtgactggcttctttcctcttgaaataagaaagtatttaacttattttttattttacaggagcccacagttgagagatttgaacatttaaaagagattttggagttttacagactttggatttataaatagactgaatttttaaagcatttgaatttgtaaagacctcgggcctttaaagtttatgatatgtttatattgttttattaatatgaaatattaggagcaacaaaaaagaagagtttaggcttaataaatgatatatctgtatagcaagtttacaacggatcaattgtgctggctggtttttatatcaccttgactcaggctagagtcaactgagaggatcaaacctcaattgaggctcctgccttcataagatctggctgtaggcaagcctgaaaggcaagttcttaatgattggtgggggaagacaccgcccattgtggatgatgctgttcttggaatggtgcttctgggttttgtaaggaagcaggataaacagagccatgtggaacaagacagtaagcagcactccaccatgacatctgcttcaggtcctgcttccaggttcctgccctgccttcatttcaatgataaatagtgatgtgcaagtgtgggagaacagggccaaaaatgggtggtgagaggtgacagagtcacttgccaaatctgagggatcagactctggaaaccagcatcagggtgcagatctgagcttattgcacagtacagaagcttctgtacagtgtttgagccaatcccaagaccctaaatcctcagtcacatggtcactgtcttagttagggttttactgctgggaacagacaccatgaccaaggcagctcttataagaacaacatttaattgggactggcttacaagttcagaggtttagtccattaccaaggcaggcatggttcaggagaatcagagagttctacatcttcatctgaaggctgctagcagtatactggcttccaggcagctaggacgagggtattaaagcccactcccacagtgacacacctactccaacaaggccacacctccaaatagtgccacttcctaggtcaagcatatacaaaccatcatagtggccccaataaaagccttgcctgatgagctaacttggaagaagtgaggggagaagggagcatcattacctgttaggacttcgatgaagacaggggaagcagccaccatcctggccttcatttctttttgctgtctcattagttttctgggagccatcttagatctgaagctatgacttcgaggagtcacaggaacctggggtgcttcgctctccaccccacttttcccttcacaaggttgacctccgcatcccccacagaagtgtaagccaaatcaagccttccctccaccagttgcttttggttacggtgttttgccacagcagtataaaccctaagacaccctctgaaactgtaagcaagcccttgttcaaatgctttcctttataacctgttttagtcatggtgtctcttcacagcaacgaagaaagaaacctttagttttatgaccgtggatcagcatacaaggtattcaaatcagcttcaacttacttaccagagtagtgcccgagtggatggcttagacaagattcaaaagttttgttcaaaactcaaatagaactatatctagttttctaaaatagatcttcacggtaactgggatttgttttaacttgacaaatataaaactcaaggagggaataaccaaagcctgtgctgcttgtaggtctccctgggctgtatgaggtcatattggtaataatgttggaaagataacattatcaaagggccaagttgtagactgtgcaaagaataggcaacatattgggcctaagactgcaacctctgactggcattgaaaccccagattccggatgtgttcccaccaccaattcctaaccaagaatggtggtttctagaatgtgtggcttgtacagaacacctactttccttctggaatgtgaaattctgtgtgaggaggatgtctttatgattagccacactaataaccagacttctggtcccaagtaagattccccggcagaaagcacttgtgatatggcttgatgctggaagaagtacaccttgtggaacttaaatgtcaaagaactatcaggaattttgtaccctatttcttcctgattttgtcatatgtactgttttcctttgctggttctgctctgtatatttttgttacaataaattaaggctgtgctggatattatgagctcttctagtgcatctgcaaaatgggtgggaacttcaattgagtaaattccttaatgagactggcctgtaggaatgtctgctaggcattctcttgattaatgattgatgtgggcaggcccagcccactaggagtgctgtcacttctgggcattgggtcctgggttgtataagaaagcaagtttagcaagacgtgaggaggaagccagtaagcagagttcctccattctttccttcagaatctgcctccaagctcccgtcttgagttcctgccctgacttcaattgtaaggtgaaataaaccctttcctccccaggttgtttttgatcatgctattttatcacagcaatagaaagcaaactaagacagaaactggtattgagttcatgggacattgcagtgacagaccagacaatgttgtgttgaggattgtggaactttggaactttgagctggaagtcactgagcttagggagatgttatagaagcttgggtgataatacagaaaggaacgcagataatggaggcctggcttgtgaagtttcagagggaagcaaaggcactgtcaaagccacgcatgtagtattttggactaaaaaacatggggctgagccgggcatggtggtgcatgcctttactcccatcacttgagagacagaggtaggtggatctctgtgagttggaggtcagcctgattttccatagagttccaagacagccagggctgttatacagagaaatcctgatttaaaaacaaaacaaaagaatgtgtggaagtgatttgctttgctttgctttgctttgctttgctttgctttgctttgctttgctttgctttgctttgctttgctttgctttgctttgcctggagaagttgatactaatcagctgggactgaaaaatcagctctgattaagaagacatcagtgaaagaggaacactcctccattgttggtgggagtgcaggcttgtacaaccactctggaaatcagtctggcggttcctcagaaaactggacatagtactaccggaagatccagcaatacctctcctgggcatatatccagaagatgccccaacaggtaagaaggacacatgctccactatgttcatagcagccttatttataatagccagaagctggaaagaacctagatgcccctcaacagaggaatggatacagaaaatgtggtacatctacacaatggagtactactcagctattaaaaagaatgaatttatgaaattcctagccaaatggatggacctggagggcatcatcctgagtgaggtaacacattcacaaagaaactcacacaatatgtattcactgataagtggatattagccccaaacctaggatacccaagatataagatataatttgctaaacacatgaaactcaaggagaatgaagactgaagtgtggacactatgcccctccttagatttgggaacaaaacacccatggaaggagttacagagacggagtttggagctgagatgaaaggatggaccatgtagagactgccatagccagggatccaccccataatcagcatccaaacgctgacaccattgcatacactagcaagattttattgaaaggacgcagatgtagctgtctcttgtgagactatgccggggcccagcaaacacagaagtggatgctcacagtcagctaatggatggatcatagggctcccaatggaggagctagagaaagtagccaaggagctaaagggatctgcaaccctataggtggaacaacattatgagctaaccagtaccccggagctcttgactctagctgcatatatatcaaaagatggcctagtcggccatcactggaaagagaggcccattggacttgcaaactttatatgccccagtacaggggaataccagggccaaaaagggggagtgggtgggcaggggagtgggggtgggtggatatgggggacttttggtatagcattggaaatgtaaatgagttaaatacctaataaaaaatggaaaaaaaaaaaaagaaatacacccccccaaaaaaaaaaaaagaagacatcagtatctgtggtaggatgaagcatcctttgggtgtatgcctatggtggtttgaatagaaacagcccccataggctcatagatttgaatgcttgagcactagggaatgaaactattaagaagtatggacttgttaaaggaagtattttactgcaggtaggctttgaggtttcaaatgttcaagccaagcccagtgtctttctctcttcctgaggcctgccaacacagatatagaactcttggcttcttctccatcaccacgtctgactggatgccacatgcttcccaccatgatgacaatgaactaaacctttgaaaccataagccagcccaaattaaatgttttcctttataagtattggcatggcatagtgtcttttttttccttttttttttcttttttatttttattgttattttatttacatttcaaatgttatcttccccctccccggtttcctctctgagaacctgccatcccaccccattctcccctgcctccacgaaggtgctccctcacccacatgcccactcccaccccacggccctagcattcccctatgctggggtatcaagccttcacaggactaaggcatagtgtctcttaagagcaacctaaatcctaagtaagacaatacccaatcatggtatagctggatcttgaggtaggtagattcccaccttcctaaggaacgaccacgttgatatccatagtggctgtacaagtctgcactctcaccagcagtggaagagtcatccccctgctccacatcctcaccagcgttttattgatcttggccattccaacaggtataagatgaaatctcacagtagttttgacttaaatttccctgatgactaaggatgtcaaacatttctttaagtgtttctcagccacttacgtttcctcttttgagaattctcttgtttagatctgttacccattcttaaatagagttatttcattcttgctatctagtttcttgagtttttatgtgttttgttattagtcctctttcaggggtgtaattggtaaaaacatttttccccattctgtaggctactgcttaatccaaacgatggtgtcctttgctgtacagaagcttttccatttcacagggccccacttattaatgtttttaccttagtgcttgtgctaatggtgttctgttcagaaaatcttttcctgtgtcagtgtcttcaaggctaccctatcagcttcagtgtttctggttttatgttgatatctttaattcacttggagttttgtgtaaggaggtgagtatggatccacctggatttttctacatgcagacatccagtctgaccagaaccatttgttgaagattctgtcctttttccagtacgtatttctgacttctctatcaaaactctggtgtacctaggtatgtacatttatgtctgggtcttcaatttgattctatgaatcaatgtgtttgtttctatggcaatactatgtagtttttattactggatctctgtaatacaattttaaatcagggattgtgataccaccagcaagttttttattatacaggactattttagctattctgggttgtttgcttatttgtttgttcgtttgtttgtttctttccatacttgtcttagttagggtttccattactttgaagagacactatgaccaaggcaactcttataaggtatttaattggtgctggcttatgggttcagaggtttactccattatcatcaaggcaggaacatggcagcttccaggcaggcatggcacaggaggaactgagagttttgcatcttgtttcaaagaataacaggagactggcttacaagcagctaggaggaaggtctctcaaagcccaccctgacagtgacatacttcctctaacaagaccacacctcctaatagtgccactccctgggtcaagtgtattcaaaccaccacattccactccctggcccccttaggcttgttcaaacacatgagtctatgacggtcatacctagccaaagcataatgaaaaatacacttaatccaacttcaaaagtcccatagtctataacagcctcaacaatgttaaaagtccaaagttcaaagtcttttctgaaattcatgcaatctgtaatccctaagaagttaaaagcatatcacatacctccaacatcatgtaggatataccttaccattccaaaacctcatggtgaggaaatcctggaccaaagcaagacagaaaaccacctgggcaaactccaaactctgaatctccatgtctgatgttcaactcctttcagctttgttggctgcaacaatgttttcctcttgggctggctccactccctgttagcccctttactcagcaggtatcccagagatggctctaatatcttggggtattcaaggaaacttcaactttatagcttcttgttccaatgtctgggatccacatatgatcttctaggctcctccaaagggcttgggtcacatctccagctatgccctctgtagcacttcagggtcttgttggctcaactccactgatgctgctgttcctgattctcatcacatggtactggtatctctaacactctgtggtttctcactgcaactatgcttcaccagtagcctctcataggctcctcttatggtgtcaaggcacaattactttccatgacccttcagtcctagggctatcaactgcaactgcttcaccttcatgaacgatagccttccctggcccctcccagtgccaagcctctgctgctctctacccctttatgacttcaaaaccaatactacctgggtatttcttacacattaccaagtccagctgcaacatgaggtacaaccttagctatatctgaaacacagctcccttgtgttctcagaaaacacttcccagaagatttcacctcagtagtgctggtctcttcttaattaccactaatttcttagccacagctaaccagcatcaattgtctcagtagtcccttctattcttgactctaaagccaaatccacatagcctaactaccaagttttgctgcttactacagatggaacattgccccctttttctattacattattacctggtttgttttccaactcctcattgcctaagcttggctgttctggaatttgttctgtaaactcaccttgaagtcagagatctacatgcctctgtctcctgaggcctgggattaaagggatgaaccaccacgcctggacctaagcttttctctatttgctctgtaccaggctggccttgaactcagagatctgcttgcttctgtctcctgagattaaaggtttgtaccatggtgcctaggcctaagtttttcatggccattattcctcaaggtccagatcaaaacctgtgttttccagcctcaggatctagatcatagttgtgctctctatttctggattgtagttcattccaaattaaaagtcctaatgaaaacataaccaagacccttattcaacttcaaaatcataaacaatgagcttaacagggtgggatcttgcttcaaggtcaccactttcttaatctatttatctccttaaacataggattcatcttcattctatatcccatcgcccctttaatctttgaagcatacattttgtatttacctttctatgtttgctatgtttcatcaaaaagctttttatgagagtaaactagaggacaaagtctatgctgtggttttctgagacttcttttgtaaatgcaactaattgaaatttctttaccttagcttcaggtagacacttctgacaaggacaaaaaatagtcacattcttcaccaaatatcacaagaatagtctctaggctacatactaaaattcttcaccactagacctcttgggccaggatgcctactccatcaaataaccctcagcagcaccatcttccatattcctggcaaggatggcccattaaacaccactttaagcattccactgtttcttatatccaaattcctaaagtccacattcctccaaacaaaaacatggtcaggcttatcacagtaatacccaactcctggtaacaacttctgtcttcgagtttccactgctttgaagagacaccatgaccaaggcaacttttataaaagacaacatttagtaggggctggcttacagttcaaaggttcagtccattattatcaaggtgggagcatgacagagtccaaacagtcgtggcacagaaggagctgagaattc

SEQ ID NO: 58 - DNA, 251364 bp, Mus musculus
tattctgtactgggttgtaggcataaactacatgttttaaaacaatggtaaaaattagtgtatccatttgcagatgaagatttctgtgttgctttatagataggcattaatagctcatgaaaaattgcaacatttcatgtttaataatatcaacactaagattgaaacctacagctttttctcttctaactcaaagcatgactttctacagtgttctttacttttggtcaaaaatgtagctgttcactgtcactttactaactgggctttctctctctctctctctctctctctctctctctctctctctctctctctctctcctctctctctctctctctctctctctgtgtgtgtgtgtgtgtgtgtgtccaaatgggagagggtggcatgtacaaggtacaagttatagatgtataacattaagtcagatcctgtttgtcttgtcactgtttgaagatgcggtgtacattttcaacaatagaaaaattgctactttacaattaaaaatcaattgaacagggataagaaaaagtagttatacaaatcacactctctccaacaaaataaaagtattgttcagtagactaacataactggtagaacatgctttggtttaaaatgagcaaaaaagaggtgaaattttatgttccctactctaaacttctaagtgcttctttcttgacctgacacaaccatgaacaatgacttcctttgttggtggatcttggtctcgggaggtcagccaagctttaggtatggagcacaatgtttttttcaggcacaaccagctcctcctgccatcttcttcatatgggaactttgctgactccctttgtctttgcttctgcttgtgagtcctttctcaccagggcaaggttatggaaactttccatcaagatccctccaggatgtgtagccttagaaaggaggctttgtactgagatagtatctgggtagggagcaactgagctgtgcttcacctaagaaggagcctttactgccattgagtagaggtaagtgttcatagtagcaaagttatgagaaaagagttacaagagctttggatgattttggtacaattccctgggaccctagaggcaccagatctgcatatttcctggcaaacagatctttcacattgttataagggtttattcttgacagaaagtgcaatggcaaaaacttaggtctgctattcacagcctctcctgtaacaaatatagagttcgtatcaagaaggaaacatggaaagctgagcctagaagttagatcttgtatccctgacgaggttggagagatcttaacacaattgttcaaatcacaatgacctcaactatggtgcttgataagctttctgtgtgtcaagcagtctttgtagccatagatagcactgaaatttttcttcaaatatttagccaaagtaaagaattagaagaaacctcatagaactcagcatgttgtgagggtgcagctgagactacaaaaatagtaaagattgaaaccatggagagtaagcagcagaatcatagtaggaataaaatatactggctaaaatcagagaaagagcacatgcatcgagaaataaaaaacaaagcgcagccccttccctatctgagttggtaattactgtatattcactttaaaattgttgaaactatgagactatgcttgaaaactggcttgctcatgtagagaagtggtggagtgtcttaactgtgcagctctagcattttttatagacagtgacatcactaagtcactgaaagccccagttctaatttaccaagcagggctggaacatacgcgaacctgccttagttctgagatgggctccagactcttctttgtggttttgattctcctgtgtgcaagtgagtgctggtcaggccactggtgtgctttctttttttagaattcctaagtctctttgctaagacgatatgatcaggctttggctttctttattacagaacacatggaggctgcagtcacccaaagtccaagaagcaaggtggcagtaacaggaggaaaggtgacattgagctgtcaccagactaataaccatgactatatgtactggtatcggcaggacacggggcatgggctgaggctgatccattactcatatgtcgctgacagcacggagaaaggagatatccctgatgggtacaaggcctccagaccaagccaagagaatttctctctcattctggagttggcttccctttctcagacagctgtatatttctgtgccagcagtgatgcacagtgatgtgtggcttccttcactctgcacagaaaggaaatagggaaaactagctctctgtgtaccccaggaagtgtctgcctctgtaagacccactgagctttgacaaactaggaaccacacagcatgagtctcatccttactaaggtcattctgacagatttttatgaatacctgttatatatccagaacttgtttctgttttcagagagtgaaatgaacctttagttgaaggtcatgatcactcttgataatctcataccatcatctcctaccctttggtcttcagtgaccacttcaatcactttcctacccaactgaaaagcttacactatctcttctctggatgcttttattctataagtcaatagtccctttgttcgtgaggacaatagcctataagttcctttgccatttttcttcatccatctgaatcatcagcttttacccagcattccttgctgttttgcattctagctaaacttgtctacattcaattgcttcctcatttgtactgtgctattttcaactctcttttgtattgtagatatgcctttcccttttgtttctgtatcaatcctttgtgtgtgtgtgtatgcatatatgtgcatatacaatattccatacatatatatatgtatacatatatgtgtgtgtgtatatatatatatatatatatatatatatatatggaatattttcttttatccttttaaagtttaatttcattaccttgtttctattacctctcttttgtatttaacccctaacatgctcttctcttctttcaaattaatttcaaatgtgtgtgtgtgtgtgtgtgtgtgtgtgtgtgtacaacctgataagtacacttagtgttacttccatgtatattctttatgtctgagcacttaagattggataatcatgtaaaggacttacccaggtgaagtctctctctgcagtcttcaatttcctctaccaaaaaaaaaaattctggagggattgtcatgcagattccatgatatattacttttttttttttttaggttttgaggagattagaaataaatgtaacttgttttcttgttacaacatgtaagaactttggctcagtgggtggcaattggcattttacagaatggacaataaaactgaatcagcactgagtttgaagatatgtgtgatgctcacctttctagcaccaggacaggtctgagaaaataaaggaaaaaagtatattttggatttttgtcctagtgtttcaaaggttttagtctatggttaattggacttactattttcttcccactagaccctgctttctgaagttgtctccatctctcaatgtccttgccaatataacctatctatggattagtcattggtgatatcaaagccttcatcacctaatatatctggaagctcttctttgaatgagcactcaagcctttaatatgtgaatctttgggaaacatctaacatctataccaaataagcactattttgcattataatgtagcacaacatgcctgaatataattcttacccccaaaagatgaagaatactaatattaaccaaaaaaggtaacccaggaaatacaacgatgttccacctaagttttcaagtcacagaagagaaaaaggaaatgttagagaacactgactttatcctttgtactgctcttagaagtaaagtattatcagctgttgaagtgatgatgccgagccttgatttcaagtctcttggttcctatgttacctaccagacaggaacaatttctaaagagttacaatacagaatgtgcatggatctgtggactgccagaactgtgttattaccatagaagaaaattacagccacaccaggaaacccttcacgggatgctttctgacaaacaccgaatctgctagttaccaactcatctgacgtccatgcattctttccctttggaatctccatggaggactcagccattgagagttactttcatttttttttttgtcagtttgtctttatctctctctctctctctctctttttttttttttttactttttaagcatcataattaaaacataataacataaaaattttacctttacagttgtatgggaggatgtatttgcttactctgtgatttgagtctatgaaataaattcatagattaacaggcaaaaaagctatgcaagctaatttcatgcctggggtcatcaaatgagaaaatgaaatcctaatacctaatggtctctggaaatttctcttccctcttcactggctgaggtgcaggtagaggcagtcaggttggggaggaataaagtatttggagaaaagctgaacacgtccttgggagagtgggtgatagactctgtgaagtccctgtgagcacagtatggacttttccagtgtctcctcctgcgatgtcttaatcttctgtggttggggggactcacatggagggcctcacagctttctattggagaatctgcatttagtctaccagggaaagccaagaaagaaaaatttcctgctctggcttatccccaagttcagaagaagaagaaaccaaaatagggcagtggaccaccttttctgaactccatcactgtttttatatcagtcacttagtccttttacacatatcctttgtgttgtacatcagtcattgtcatgtttctccaaaagtttttatctgtaatccattaagcagctactattgtttcatctgacccacgatcttgcttattataggaagtatatgtttagaaatatatttctttctctttgagtctgatttctctcacttagcataagtatcactttttttttttttttcgagacagggtttctctgtgtagccctggctgtcctgaaactcactttgtagaccaggctggtcttgaactcagaaatccacctgcctctgcctcccaagtgctgggattaaaggcgtgcggcatcacaccctgctctgagttattattaataatactcaactgacattgaatgttaattctctctttcctcctagtcttgaggttttttatttattttgggtttttttttgttcttttgtttttgtttgtttgttggagtatacaggagattgtgaagtcatgcagtaattctgtttgatattttcaatatctgtcaaagttttgttaagggagctgcaccattttacactccaaacatcaatgtatgagagttccagtttttccagtctttccaatattttctcacattcatgtattactattgttgtggctgtctgtgtgtgaagtgatatctcactgtgcccttttaaactacttggaaccagcaaggtcaagcatctacttattgttcatggcacatatgtgtgttttctttgggtgaatattgtttgttgtcagatgtgttttaaagattaatatggcccttagattattaagagttttactaggatgagggtaagtagaaacaaaaatatacaccttcagattttagacaacatcacttcattttgttggctgagattagaaaactttcttatgggaagagaccatatgcacatacacaggtgacttttccagagcctggcactatattcatctcatagggcttgcgtctatcatcactctacttatttaacattaggtagtgtgtgtgggctgtagagttggcttagcagttgaaaacgctggctgctcctgggttcaattcccagcacccacatggcagatgaaaagtgtctggaactctgttccaggaaatccaacatcctcacagacatatatgcagtcaaatcactaatgtacagaaaataaaattaaataaattattaaaaactaaaaaatacccaacactaggtagtgatccatgtacataattaaagtaattctgctctatacttagagccataaaaaacaataattcagtggggagggagctggtaatttagagtatgcaactgccttgtgtatgtgtttaggaccaacaagctgggatttggtaacatattgagaggctcatctctctctctctcatcaacctgtggctcatgtgtgtgtgtgtgtgtgtgtgtgtgtgtgtgtgtgtgtgtgtgtgtgtgtgtgtgtgtaaaataataccagaagaaaaataatttcatttatgtgtaccataataattaaagaagatgtcatgaattcaagaaggatttggaggaaacatggcgggggatagggtaaatgaggaaatgatgaaggtgtggaaatagaatactcacataagagattctcaaaatatgaaaatgttattagtattattattcccaaatattgaaaatgtagctatcagtagaagcttaccattccctatggaagttcagaaaactcatttattatgatgaactttgacatgccactcaaaagcctgagctgagtgtgaggacactggatgaactcacatgcagtctgtgcatatgctaaaccattttcactcagagggactgtgctaagactgattctctgaagggacagtaaagtcatcatgggaagtgtcatgtggtactaagtaatgcagctgtcaagaccttgctgtggtaagccctcctctgccctcaatctgccatgggcaccaggcttcttggctgggcagtgttctgtctccttgacacaggtaagtttttagaaaaacagtctccgttttgcatttctctggggtgtgtgtgtgtgattatttcaattgttcccattttgaaacagtctgatcttttcccacagtactgtctgaagctggagtcacccagtctcccagatatgcagtcctacaggaagggcaagctgtttccttttggtgtgaccctatttctggacatgataccctttactggtatcagcagcccagagaccaggggccccagcttctagtttactttcgggatgaggctgttatagataattcacagttgccctcggatcgattttctgctgtgaggcctaaaggaactaactccactctcaagatccagtctgcaaagcagggcgacacagccacctatctctgtgccagcagtttctcacagtaactcagagacacatccctgctgtgcacaaagctgatggttttcttcaagccagctttcagcagagacctgggactatttcttatactccatggacagagttggtctttagacataggccatgctgcgtgtatccagagatcacaaattctttcttgaaacacaaggactgcaagtggttgaaaataatatctcagggactccaagtaattttttcagtaacaattcaagaaccccaaactgaaagcgacttttcacagactcagtcatcataatttagagatacctgtgtatctgtgaaataagcaatcaggaaatccatccataagccagtagtacagatggaggttttctgtgagtaacaggcagcaggcttcctactggagctggagcagctgagtgtttagaatgctatccttcgtgacatccttatattgtgcttctaagcctttgtactagaactctctaaggaacaaatactctactctactctctctctctctctctctctatatatatatatatatatatatatatatatatatatatatacatatatatatgtatatgtatatatatgtgtgtgtgtgtctgtatacatatatatatatttataggggttatttctactcttgcttgtatgaaaatgcattaataataattacatttatttttactattattaatattatcaatcttaactcatctttaaccatgttttgtcttcaaagaaatacgtaaaatggataagctgacaggagttacagactttttagaagaatacatttgagtttccatgaagtcctgctcctccaacccatacctatcaaacttggggtatgcgaccaccacgcccattccaaatccccacacaaacagaataccacttttcacagactgctgccgctttctaatgtccctggcacagctcccaaagtatttcaggtttgatccagttagctcggaggctattgagcatttcatgtgtctgcttttgtctattacaatgcttccttggaatgttaaaataccaagttcgtccctttgttaagagcttctaaagcaacccaggggcctcaggtaccccccccccaacacacacacacacacacacacacacacacacacacacacacacacacacggtacctttttatgtctgtctctatacctttactaacttcttcctgatattctacaatagtaagagaagttggtctgaactgttaggagttcttgggaaacagcagggttgcaggggagggttctgcatgcacctgcactctcaggccttcccggcactctgtccttccttgctgagtctaagtgcagttcacaaggtttgttcatttgcctttacttcatatcatcccatctatttatctagaagatccggttgtatggtcgctaatgatcacctatggcctccttgtcagaatttaaaaattagactaaagtaagattaacaccgattccctactctctaacactggcacattataaaatctcacatctcacagctccagtttgtgttgctttttgtcactggccactagagggcactgtggattcactgttagctagaatctgtgtaaaggtttgggaaagtatgcaacctggggtttttgttttgtattgttttgttgtttggtttttgtttttgtttgttcgtgtgacagggtatatcactggcctagagtttgccaagcaggctaagcaggccattcagtaagctccagtggtctgcttgccatgtctctccagtatatgataacaatctcacatcatggccttttctttttctttttgcatttatttgattatttatttttatctttattttatttttaatatattttttacactccatattccattccctgccccccccatccaccatccaactgctccacatcccacatctcctccctaccacaccccaccccctatctccacgtggatgcccctaccccctactccacctgacctctaaactccctgagacctccagtctcttgagggttaggtgaatcatcgctgaatgcacaaagacccagcagtcctctactgtatgtatgtgtgttgggggcctcatatcatctggtgtatgctgtctgtttggtggtccagtgtttgagagatctccagggtccagatgaattgagactgctggtcctcctacaggatcgcccttctcctcagcttctttcagccttccctaattcaacaatcagaggtcagctgcttctgtctattggttgggggcaaatatctgcatctgactctttcagctgcttgttgggtctttcagagagccgtcatgatagatcccttttagtgagcgctccatagcctcagtaatagtgtcagaccttgggacctccctttgagctggaccccactttgggcctgttgctggaccttattttcctcaggctcctccccattttcatccctgtaattctttcacacaggaacaattatgggtcagaggtgtgactgtgggatggcaaccccatccctcatccctcacttgatgtcctgcctctctgctgggggtgagttgtataaatttcttctccctactgtcctattgttcatctaaggtccatccctttgagtcctgggaatctctcacctcccaggtctctggtgcattctgcccccacccccaaacctcccatttgccaaggttgcttgtttccattctttctgctggtcctcagggctttagtcattttccctcaccaaataccagatcaggttctccttttacccccctcccccacttttaaaatgtagtttctaagaactcaattcaggtcttcctccctccctccctccctccctccctccctccctccctccctccctccctccctcccttccttccttccttccttcctttatttcgctctctctttgagctttcccccttttattaaaaatagattctcttctcatacaatatattctgattacagattcatttccctctactcctcccagttccctaccaccttccctcccctttagatccactgtctttctgtctctcattggaaaagaacaggcttctaagagataacaaccaaagatggcaaaataaaatatagtaagataaaacaaaagtccttacaatagaggctggacatggcaagccaaaagaagaaaaatagcccctcaaagctggcacaagaatcaaagactcacttgtttgcatactcaggaatcaaagaaaaatactaagctgaaagctgtaatatatatatatatatatagaggacctggtgcagataacttgtatgctctccgcttgctgcctctgtgagctcatatgaaccttgcttaattgactcagagaagcttgttctgtcttcttttccctggggtccactgagctatgagggtatgaatttgatagaggcatcccattctctgtctctgtctctgtctctgtctctgtctctgtctctctctctctctctctctctctgcctgatgcctggcttctgtgatgatggctgaataaggcactgatctatgagtatagcaaaatgtcattaggagccattttattgatacttttctgtttttagaacagcagcatttggttttaccctagatctctggcctatctagtgtctggttcttgatcatctaaccagcatcaggcgagtatgggttctatcttgaagagtaggccttaaatcaaatgaaacattggctgcttactcccacaaactttgtttgaccactaccttagcatatcttgcaggcagggcagaatgtagaccaaagatttttttttgtctagcttcatatttaattttttcttttggtagtctgcagagtacctttccataccaaagacacaagaatgtaggggtgaaggttctacataggcactggcttgctttctccttgttcaatgtggactcgggcgtttatggttgcagagcaaacattttgctgactgaatctccagccttgatttcagggtttcagacatgagtctcatggatgctatagtgtattactttccaatagctgctataacaaattccaactaactttctgtattcaagaaatgcaaacttattttctcacagttttacgtgaatgcattggtggtagcacattccttttttagaggctctataggagaatgcagtttctcatcttgtttttttttttttttttaattttccggagtctacaaataacttggctcatggtcgctttgattataaaaacaaacaataacaggctgatatttttctttgctgctcttctctgactctttttttttttttttttttgtctttcacattataagactactgtgattgtcatctcatgtacttggaatttgaagatcatctccttgtcaaggcaaggtcaaatggtcaaccaccttaattccactgggaacttaattctctcttgccatgccatctatcatactcacaggacccagggataaggcatgcttgtctttgaagatcattctttctcctgcccacagacaccaggtagcagggaggaagaagaattttttttgaaagcagaatcttcattctgcttatcatggtttatatggtttatatcatggacccaacatgttgcaagatagtgtctaaaagaagaagaagtactgtacataacaccagagagtttataagttatttaaaaattgctacttaaatataggtactctcaagttcatagaatttggcagtaatttactatgtcaacaataagaaattcaaactattatatccttatcagtaagtaacatattagactggcccaggaaacagaaccttccctcatttctccacagatgccacgctgatgggatataggtaggccacaggtgaggtgaaagaccaggcattaatgatgaacaagcatggcaagttttcagggaagaagaatacacagtaagtacattctgcagtagtttattttcaaatctttatgaacaagatgtcccctgcttgtttcattgtaggaatataggggaggctgtatggtggagttggaatatttgacaaaaatatgataatactatatcatagaactcgttcaccacacaaagctttccattgtaatctgctttccaagactcacctcctgccttgttattgtaacagaactgacatcatttctgtggagtttaaaggatagttcttaattgaccaatgagtgatttgagtctatgatagtgggacaactgtgccaccaatgagggaatatggcaattttaggttcttacaagagggagggaataggaaagatatcaaaaattgataaagccaaaccaactactaggaacctcaaatgtgtaaaccttcaccttacttcaattgcagttgcatccagccctacttgctctctagagcttcattctcccctcaaaacagcttttacactgcagttggggttggaggtgtttgtggcttatctgatgatgtcactgaccaatagatgtcacttaagagaatgaagtgttctcaaagtcccttctctgctcatgtacaagtcctagtttggatgtgtcacatcagtgctcatcccactatgggcatccagaccctctgttgtgtgatcttttatgttctgatagcaagtaagtcctgaggatacttaacatgatcacacttgttttccgtgttcataactccacagcgttttcttattctgtctccaactttgtcttttaaaatatagatcacacagatgctggagttacccagacacccagacatgaggtggcagagaaaggacaaacaataatcctgaagtgtgagccagtttcaggccacaatgaccttttctggtacagacagaccaagatacagggactagagttgctgagctacttccgcagcaagtctcttatggaagatggtggggctttcaaggatcgattcaaagctgagatgctaaattcatccttctccactctgaagattcaacctacagaacccaaggactcagctgtgtatctgtgtgccagcagtttagccacagagctatacaaggatgccctgcctgtgcaaaaacatttgtatcctcctctccctccaggccccaccagttctgaacttttctgtgctccttcattagcacaaacaaaaacaaggaatagaggcatgacaaaaacagaagataatcgagtattaagaaatcttgggtggaaaatgaccttgaaggtagttcagagatttctcacatatggttgtgggctgaaagctcacctgtcacagaactgtaagcacacatggtgtagagtctatatttttcatctctatctgaatgtggcagttgtgataagggaaatgtcctgtgaattattctggactttcattctcttttcactcttaagttgtgaagatattattttaatgttaatgtcaacttagtgtttccataggaatttccttttttaccacacatatgtgtagagtcttatgtcaataccaatctcttgtagtctcagaatgttcttagttttgatgatgagcttaagcctggccagtcccagtacgggaatatcaggaatatcataaaccattcaagtttctcttgtcttgtttgtcctctactaatggtcccatctccttaagactcatctctcttgactcctctctctttctctctctctctctctctctctctctctctctctgtctctctctttctctctccatgtgtgtgtgtgtgtgtgtgtgtgtgtgtatatatacatatatatatacacatacatatatactgagtatatatactgagtatatatacactatatatacagtatacacatatactgagtatatacagtatatatacagtagctatgtatgtatgtatatatatatacatatatatatacatacatatatactgtatatatactgagtttactgagttcttctactattttatttcacactgatgaattcctatcaaatgaactcatgcaaaagatgcctatattctatatttaaatctccaaggcaattaggtagacccaagtaacttctgccttatagtcaaaatctttctctttgagttagttgtctcactcaagtcctaacatttgagatgaaaacaatccagaatatcatgcagttgttttcatgcacaccaagagacctacactacatctttatatgtagctcatcctgactccttgcttctttctgcttatttcttcctcttatattataagctcagctcattcacacgttaggatacttcttctagttaatcctcctgccctgtactcgccctgatatcaacacatgaaaaatttacacattgtttttaatctccagttttttgacctcattactctggaggattctgcttatctccaaatgttttcaaacttagactcatgattatagtatatgcacactgaacagatgaacacttttttttctcccttaagcatccagagagcatgaattttgtcttttttttctataaatgataacactaaagaaggttagaagtacatatatttcgaataactcggtgagttgcaaagttgtttagacctgctgctgctctgtaacacacaatgtacccaacatttccataaccagtctatttaatgacctgccagtccttttagaagacacatttgcagatggccaaatctcttttttgtatcccagcaacaccaagtgctacttcacttttgtggatactttaaaacgccacagtgtcctactcgtgtgacataatgatcttgagacacactttcagactcttcttctttcagtggttgtctattgaaaacagcatcaacagccctactgtggatggcggctgatgcttcacactgtttatgtgtttacttcatctctttgcaaaatgttcttacacaatttaacatgtccctgtgcatttgttttgctagattctactcccatctctatactttccagctttctaatgacttgccatgctgttggatgcttctttgtgaagcagaaaacaactgtactcaactctgagtataacaaaatccacgttctgaaggaacagcatgtacgttcatccaggtcatttttgctagttaagaaaatggtacttggggactcaaaaatgcctctcagctctgtgtgcttctatttaaattttcagtgtttaccaattagaatcattcaagacaatattccttcactaaaaagaaaaaaaacatcgttctttgaaagaacctgctttgaagattaaaacaaaactgcaaaatatagtgtttgcaaattaccccttcaataaaaacttaactgagttgagattcacagaagcaaccttctaccccaccaattcaagagtgtaaataaatggttgttgctcttaatagtgaatttgtggagagctttgttccaaagcattaccctgctggtatcatgacttaggcagcatcattgctatctctaagtgactcagtagtggtcacaagcatttattgaggctgattgtccaatctttgtttttctcttacatagaaatacaataatgtttcttataaaaatataataaagggggtatggaggagtgactaggcacttaatacttgctgttctttaagaaaacctgaaatcagttcctggcatcaaagtagaaatcctcacaatttcctgtaactgcagctataggagatctgatgacttctgtcttcctcaggaacctgcacacacttggtacgcgtgcatgcgcatacacacacacacacacacacacgcaatcacacaaatataccctaaaaggtccagttaagagaagagtttaaaagaaggaaaaaaaattttaaaaatattttagagaaaaatgttcagttgcttcacgtacagaaaggacatattgtatgtattttcatactaggttactctaattatgtgttgataaaacacaaaagatgtacttggagttaataatcgtgttattaacagctccacttgctcatttcaaatgcagaatatatactttgaatgttgttgtttaaagcttctgggttccctacaacacacaaaactatccaaaatgcccattaacattgtctgaatattttctgaagtgataaatgattgcaaattctttgttcattggtaagagatttaaaaagaaaatgtttctatggtcttatctaatattcaggtttttctgacagtgaaaaatttctcattgaaatggactcatcatctggattatcactggagaattactattcctaaaagtctctacaaaatcaaggagataaactattcataactgtgagctgctcctagacaggaataatttagagtctgtgatagtcagcacaactggtcaggctctttctgatgaagaaaatgtgtttaagaggactctcaaggcagaggaaattagatgatgtatacaagaaaatccaaaatcaatcaacacaattattgcaaagcttaaagcataattaaaggaacacctgtggttgatgaactatgccaaagggaatttacattttcttcaaaaagagatgagataacagtgactctaatttgtttcctccttggtgtaaggcaacaaggaggatgtttataatagaaagatgctgtgggttcctactacatcttgaagacctcagtggatgctggaaagactgaaaccaatgcatgcactcattgggaaggaggaaactaaaagggaatggatattgttttcttttctcgatgctgcacctgataaattcaggctaaccaaacccacatgcattagaatattaaggacttaaattataaaaagaaatctacaaatcatgacacaaaaattaagtgagtgaattgatgtagaaaatgatttctgtgtgaggaaaagcagcatcttagaaagcatacaccatcaagtggaagaaagcagggtatggagtcaggagggttggattcttaaagggaagaaggaaaggacttgggtctcgtggctctctgggggagacaagaaaaaggtttattttaggttttactaagacagacaaggtaatcaggaaatcccattagagggaaaattcagcatcttagaagaagcaaactggaacggttccccagggaagaggcagcatccagaagcctgtgaagaaatggctctgaaaatcacaaatatggagacttttgacacggatgtctcggaagattaaggaacgtatttaagttatgtgatctttgggaacctgcttgattaattgttaaaattacagctcttaggaaagtgtggtgccgatgaaaggggaaacaggtaaaatataaggagagaaatttagctaggagatcatgtgacagaagaaagagaaggtattaaatatttattttaatagctcttgtttaagagatttcagagtttataaatttcctatctctcaccagggaagatcgtagagataaagtctagcagaatagatttgaaatactaacttcgtgagcccagattcaggcatcaagttaatggaggtgttctatgccaaagaatactacttgttggatcaaagttattttaaaaattcaaaagaggccattttaaacattggaaattcaatttaatctttcttaaaggattgagcaatagcacattgagagaaaaaatgataaaatgcgtgttagagtagaggaaattaaaaaattataataggaaaaccattaatgactggagcatagcataactgagaaaagtcagtgatttgataataaaagagaaaaaagatggattggttttccctaggatactacaaagaatttttttcttttaaaatttatttgtgtgtgtgcctgcgacagtttatgtgtaccacatgcacatagttgcacctggaagtcagagggtgttggatttccttggaacagtagttacaggaaaaatttagtttataccatacacaaattttagaatggctctgagtattgttgtcatgttgttggtggctctttctgatatgactgaagcttgtgatgaatctttttctttgtaataggagataatagtaatagtatgtagactggcaaaggaagaatagaaagttaattcctagcttgaagttggcaccagaactcttagttcttcaagtatcttgaaaagtattcctaaacactgctggtacagaggttctcatagaatgagtctgaggtgtttgggcaacaaaaattttgtgacccttcgggggaaatgtttgtttcttccctacttctcttgataataggtgggtctgttgagtaatatctctatccacttctcttctcactcttctctatggtaggagacctgagtctaattatatgaaagaaggaactcagcatgttgaatcaagtcctctatatttatctttgtatttatttacctatgaaatgaatgctgggtattttcctgcctcagaattatggggaaaaaaatagtgatcagaggattcattcaagtggagaggctggctaccctacggaaagttagccaagttcactgtactagattcatatggattcaagctggtcaactttgggtagcttaatcttttcatctcgagagcaacattgacattttgacttttgttttgcagacttcattattccatttccatgtgttttccatgtcatatgagaaagggaagtattatttttgaatatttacaattccaacaactgtaatttgcattgctcatagctattgtaacagaatcagctacatgggctaaagaagtcatttctagagcatctaccccagtggccaccagtaggtgatgaggtgactttaaaagagctattgcagtggctgttaacctacacaagggttgcttatcatatatttacactatggctcataacagtagtaaagttacagttatgaagtgcagtgataaaattttatggtgggggggggtcatgcacaatttgaggaactatattaaagggtagcagccactgacctagaggcttgtgtggtagtgggggtattgaaaatattcaggctcaggctttgaatcacaaaaggttgggcccaaaggcttctgttcttatgtatattagttaagaacaatagtgattaagggcttcaggaaaagtctgggatatttgtcaaagaaaccattaacatactttaacaatagagcccaaatataaataatgttttatgaagaggttccctgagaaaacaatcagaaacaaacaagttcccttggttgctccacacaaggtacctttccacagagaactttgaggaggtggcattgagattgactgccaagattgtggcccattaggcactcagattgggcagcaagatgtatctgtgtgtcagtaaactcattcttgctgaggagtgtccttgatttaaaaacatatcaaaacacaatcaatcactcaagcaaacaaaacttccaacaattcaaaaagatactattcagtcagtaaataaatcagtgttgaccagaggacaaaaagaaatgagacaggcactttccaggccacttgcctctgccctatggaccacctctaagtctctgcccctgagtttgttgggcagctatataccctgatgcaagaaaagtaaaggagccatgtcaaggatatcagagcagctgttggaaaaggttttctttaacctagtccaggcttccgctatctctgtgatggaaaattcaaagcaggtctctgagaagtacactgacactgctccaagcagaggggcctctacctttaaaattccacaaaaataataacagaagaaattataatgttttttgggtgtccagaatatgacagttttcctatactaaacataaaacagtaagaaagaaacaaaaaatttagaaagagttgcccaatcatgtcttaaaattatttctaaaaatactatcatctatcatctctctctgactctctctctctctttacttttatttatttattttaagtgtatgagtctttcatctatttgtttatgcaacacatggatggcaggtgcctgcagagactagaaaagtgtattggatgccctgggactgctattacagtcagttgtgagctgccatgtaggtgctaggagtcaaacccatgtcctctggaagaacagccagtgctctttacccaccgagacatctctccagcacttacatttcttttgagtaaagtataattataccatttatgttccagtccctcctttcaatcctctatataccacacccccactgcttctcatatttgtggcccctttttcttgttacatataaatacacaaacacaacctgctgaatccccttagtgttgcttatatacttgtcattaggtctggccacatggtattatagaaacaattaggggttcatttctgggggatactaattacccctctcttgcagttattaattgttgtagttctttatttgggggtagggttacttaagaaagatttcttcgtcagtgttgaagtgtcaactagtattgccattgttcacaagtcatatttttgatacttcctgggtgtagctcccatctcatctagaaatcccaatcttgcagctgccttcctggctttaaaatctttctgctccctctgccatgatattccttgagccttaggtatgcagattaggttgtagctctgttgtcagttgttctctgaattttgacgagctctggctttctgcaatattccctatctgctgcaaaagaagcttcttggctgagggacgagctcttcatttgtttgtatattaggatcggaatttagaatgcagctgggcatgatactggtctggaaacttgtaatatgttcgcctctaaggtccaaggccttaccagccacgggcagtcagcggtgtttccagtactaagtgtgatttccctcctgctgagtaggccttaagttcaactgtacagctgttagctattgccaaggtggaagtgctatattgtgccattagggtcatcttaccatgctggtcattgttgtggtccttggattttactaccaggtaggattattcattgctttcttcccttggtagcttacgtggcaccttctgctactatgaaggctagttctcagggaagatgcttttgggtaatacctcgttagattcttctgtgtcctgtatccaaagtgtgtggcttcttcagaaaaaaaaaatcatcttctgacagaaaactaaggtcaaaaacaatagcttacattgttttaggagtctcttagaatcccctgattaacaacttgaaagaaggtttctcatgcctggtatgagaggttttattagctacactatggctgttgagggtagcattgttaccccaagctatataaattaaattacacacacacacacacacacacacacacacacacaaaagacattttaggtaaaaataaaataagatgactccttagagcttttccaatatccttagtgttatttattacttctttctcctttttctttgtgttcatagtttattttataaatctttatacactggggtaggtctaaggcacattcgaggatactgtggcctgattctgagtgttttctaggtgtttgtatttcattttccctcctaagttctatatccagcttctgccttctttgtgtgtgggtctcaggatgcttcagcccatcaagatacatcattaggacggtagtataaaaaaaagacaggagatgtaccatacaccttacatgcatgctttcaccccgtcccccagtcacacatatacatacagagacagacacacatacagaaagacacccaaatacacacatacctacacacttccatacatataaatgaatactgatagtaatactagagagggaggaatgaacatttctgatcttctaccattaagaatatctatatagtaagctaccatgcctatctatatttgtttcttttgtgtttttaaattaatcattctgttcgtttacatatctaatgatatcccatttcccggttaccactccacaaaccctcatcccctatccaccctctctctcctttgagagattacttctccaaccacgtacctctcctgccccaccattccagcatccccctacactggggcatcaaacctccacagcaccaagggcctccccttccattgctgtcaggcaaggccatcctctactacatatgtatgtggagtcatgatccctccctgtatactccttggttgatggtctagtccctggaagcagtgggtggtccggccagctgatgttattcttcctatggggttgcaatctacctctgctgctccagtccctctggcagctcccccatgggttcctgatctcagtatgacggctggctccaagcatccacatctacactggtcagttgctgtccagacctcccaaggagcagccacaccaggttcctgtcagcaagtgcctcttggcaacagcaacagtgttggggtttggtgtctgcagacaggttggatccccaggtggggcagtccttggatggccctcccttcagtttctgtatttgtttctttctgttgtcttgacacaacagaaaccaagttattctcttatgctccagtagacgaaccccaacctctgcagatggtaagttttgattaactcactgagataacaacaacagtagtagtacactaaaggaggatatgattctagtaggaagaagagtgagtcggggctctaacatcagagttattggtgggtgtggataagaccaaagtacactgaacacatatataaaaattcaaagaaaaagtaaaaattactactaaaagaagtgtccaataggtaatttgatatgtaatatttcaggaaaagtagaatgtgtgtgttttggagtgtggggagatgggataatcattgaagcacaaaggatttggtaaataaatatgtgtagggatactttaagtctttggatgaaccacccatgcctgtaccagaacaattacttatttcatggttttatttttttcttataaaggaacagtgatcacttttgaaaggtgatcctttgagcagtgacggagacagtggtgtcatcacaagcccatacaccaccctgggggacacagagctcctagagacttcagcctgagcttctcgtgcttacgtggagtttctatgagtgaagccactgcctcatcttgccatggcccccaggctccttttctgtctggttctttgcttcttgagagcaggtgagcttccaggaataaagaagctgcagcttttgatcattgtttgtcatagctacaattacattctttattctctattctgtttctttctagaaccaacaaatgctggtgtcatccaaacacctaggcacaaggtgacagggaagggacaagaagcaactctgtggtgtgagccaatttcaggacatagtgctgttttctggtacagacagaccattgtgcagggcctggagttcctgacttactttcgaaatcaagctcctatagatgattcagggatgcccaaggaacgattctcagctcagatgcccaatcagtcgcactcaactctgaagatccagagcacgcaaccccaggactcagcggtgtatctttgtgcaagcagcttagacacagagctacagaatcatagtctgctgaggcagaaaccatacgcttcccctctcctgtccacctcccagaagctgttctcaactgtgatcgtgaggttttctcacaacaggaagtatatgggtttaatgtcttctctatcctagacaaggcaacaacagatggtaacgagtattacattaagaagtcttgtggtaggaaggtatgtagagaaaggtatgtggtgggtgatgagcagacaaaacttgttcatgggatccctcatatatttttcataagggtaagtgagtctatgattaagcacatatgtcattcagtgggcctttcatacatatatgtgagctgaagactaaataggctgggaggtatggaagaatgatcatccctggttgcttttcactacagcttagacaccagttttcttctcctctccttaaaaaaaaacaagactccatgctacaagaggtagcttttgcctgacactgtctggatgtccagcaagaaccagaggctagatagcccagagacctaggatataccaaacatgactggcaaaacaaaactcagtgaaatgattcctaatgctattctgctatactcatatatcagtgccttgcccagttgaggcttcctcctacatctgatcagaacagatccaggcatatgtactacaactattgtaaacatatccctgactaacttacaaataaataagatccaggctatggttaatttatttggttttgagaattactagggggtaacctttagcctacttgtgtaactgctgacatggctacctcctcacagctgatccccaaatacttgctgtttttcctggatatgctcatgacccttcttctcttatggtgttttctcctctctcctccttgttttcttccttctctcatgctcaaccaggtaacaaaaaccccacctatctctagtattccagtaattggctctagccatttttatttaactaatacatataaattaattaacaaggttttcacaacaaagccagtaattgagaattcacttgtagacctagaccttccttcggatatagaatttagcattacaatacatagcaacagacatttcttttgtcaaaatatttgatatatttttgagtttgttaactgtataggtacatcataagcatctgaaaattataaaaaccttcaaaatactaatttaaaattaaacataatattaaaatattatgtatatgtatataaatatttacatggtatttgaacctgtttcttgttagagtgtggcttagcccttagcaaacaactttaaacactctggctggaaaatagaaacatccttagtactcgcctttaattccaaacaatgaaggtaaagtgagtttcaggaagaagcacccatgtctgaaagtgatgtctaattgagtgatagaaaggtaacaaatcagaaaaagatttggcagaacagaatattcccaactttcccaagatgagaggggaaaggaaggctatttagagaagagacagacaatactgaaatatagtagagtttctgtagagctatgcagtagagaggaacagtagaacaacacagagggagaaggaggcagttttaccaggagagttttacagagagagactaaagagaaaacaaaccagacacagagaaagacagaagaagcaagagaatgagaataagctagaagattagaaaagattgctagagttagtttgaggccaagcagagcaattcagaggccaagagaaatccacattgaataagtcatctgggagaggagtttgatccaaaacagttgagttgaaccagccagctagagttcagaaagaatgagaaagggtgagcttattaggcaacaaacctcagagactgaaaacattctaggcttagattagattggacagaggctagaagcttctagaactaggcctagttagcagactgaggtcataagcccttggagatgaaaatcacccaggtgaataagttatactttacaatatatgtaaaaccaagatggtaagtataatagcttatttactggaagagataagcaaaataaactgtaaaaagagagtactttataaaatactctgcaaaataatacaaggaatatgagcttatttaaaggatcagtgactggctcaaattgggatccatctcaagggaatgctccaagcctgacactattactgatgctatggtatacttacagacaggaacctagcatggctgccctccaagaggcccaataagcagtggaaagagacagaaccagatacttaatggacagaagccaggaacccttatggttgaatagggaaaggctgaagaaattgtggaggagagctactccataggaagaccagtagtctcaactaacctggaaccccaagatctctcacacactaagccaccaaccaggcagcatatacttgctggcatgaagaacccaacacatatacagcagaggattgcctagtctggcctcagtgagaggcctggtggggtggaggcgggtggggacatcctcttagatatcaaggaggaggaattttgtgtgtgggagttgtcagacagggaggataataacaactgaactgtaaaaaaatattaaagataatttaaaagaaaagaacaaatcaataagtcaataaatatctttgttgaaatttgtagccactttcataaggaaggtgaaaagtatttaatacatttccaagtagggaatgagagcaaagagaggaagagcagaaagatgatcattcttatcttagtctatttatttttctgcctaagcttgaagcactattaccaccaaatttaaatgtaaaggtaatactgtatacattgaatctaaaaagaaaaacaattataccttttaaaaggaggtaattggtaaacagaaatctaggaaaagaaatataggaaaagctaaaatcctaataaactacatctatctactccagatgtgagcatcacggagggaattggaagtttaaggaccatttaaagagatgccacaaaaaaagctctagaattacatttctcacatgaatctcagagccacaaaatggccccattctttgtgaacaaaaagtgttacagctgaaaaaccagaaatgaagttagaagattgaatgtttgatcaggcctttgggtgaaagataaaaaggataaattagcagagagaaattgaaacttcctgctgtgcttcacatgtttctgaaatgaaattttatgttactgtgtagaaggaaaatcacaatctcatgggactgggaagctggctcatcatgtatcactcattcagaggacccgagcttggttccaggcatcttttcctgctctttatgaccacctgtcatttcaactcctgtgattctgaggccattttatggcctcggcaggtactcacacatttgacacacacatgaaagagcacacacacacacacacacacacacacacacacacacacacacgcacacctaaaattaaaaataaatctttgaaaagacagaaatttacatgcttagaagctcatcaaaaggaatctgtaatcattggaatccttggggaaatcaaacaagaaactcaatattgctctggcaggcacttttacttcttcttttttttttttaattaggtactttcttcattcacatctccagtgctatcccaaaagtcccccccaccctccctccccatcccccccacacccactcccacttcccggctctggcgtttccctgcactgaggcatataaagtctgcacgaccaatgggcctctctttccactgacggtcagctaggccatattctgatacgttccactgacggtcagctaggccatattctgatacatatgcagctagagacacgagctgggggcggggggggggggagttggggagtgcactggttagttcatattgttgttccacctatagggttgcagatcccctcagctctttgggtactttctctagctcctccattgggggccctgtgttccatccaatagctgactgtgagcatccacttctgtgtttgccaggccccagcacagcctcacaggagacagctatatcagggtcctttcagcaaaatcctgctagtgtatgcaatagtgtcagtgtttggaggctgattaagggatggatccccggatatggcagtctctagacggtccaccccttcgtctcagctccaaacttcgtctctgcaactccctccatgggcgttctgctcccatttctaagaaggggcaaagcgtccacaccttggtcttctctcctaggcacttttacttcttaccaaggcagattaacagggagattagagttaatctttcccttaaagtagcttttgtaaaaacaaaataaaacaagggattataaaaagatagaattgctaagacttttactgtaaaccagagaacaaaagacagaggtctatgaaatatggagcacactgaatgaagtactgtggccatctcaccctaatacttgcatattggaagtctgtgggctgcgtgggacctggtgctgacctggatgctcttcttgtgttcagtactagaaatacaaggacatgtgctatagtcagcacaagtaaggaggttagataaagaaccactcgatacaaaggagaaagcagacagagggaatctagtataccctatcagctgagacgagactaaactgcaatcctagattgcaaatctactcttcaccttttttatttaacatccttctcaaactgtaacgagctaaaatgggtgtgaggctcttttgttctcatctcctatattcattacatgcccccccccacacacacacagaaagctcaaatcatctgtcaagattcaactgtatttctatacaatggaaaaaagaaaacatctacaataaatggtgctagtgtaaccaattgtctaaatgtagaaaaatgcaaatagactcctatctatcacctggcacaaaactcaagtccgagtggatcaaagacctcaacataaaattggatacactaatttgaatagaacagaaagtaggaaatagccttgaactcattggtataggagacaacatcatgaacagaacaccaatggctcaggctctaagataaaaatttgataaatgggacatcataaagtaactgcaatgcagagaatattgttaataggacaaagagaagcctacagattgggaaaggatctttgtggggaattgcaggctggtatccagtcaagctgaggtctgaaccccaatggtcataattaacctacatgacacagtaggcattccctcatgctcctggaacttcggcccctgcctaagataccacctcccacagcccccacaagagaagcatggtcagtagtcacgcaagcaatgacccaagcttctgaccttcaggctaaactcctccctagttacctagcaactgtgaagaccataaaaaggggtgctcagccccaacctctctctctcactcctttttcctctcacttctcacacttctttctcctcttccctttctctttgtcttctctcctctctcctttttctttgtcctctcctctcctctcctcccctactctctctctctctctctctctctctctctctctctctctctctctctctctctcctctctttcccctgcatttctataacaaagctcttaaaccatagagagtctctgcccttcaagttctgctgggccatctggtcagtgttgggaacttcttcccccattccctctctcccacaaccctggtggctttagcaaaatagctctggggggagggggggagtccccaggcagggttgccccttggccaccccctgaagagtgggataaaggaatgcccatccagggatgagtggatagggtagatagcagccctcccacacctgactgaccagagacgagggaaactctggtggggtgtgggcatctttttcctatctaacttctccccgggattcccccaggaccccccacctttattttgttcccaacagatcttcactaaccctccatctgacaggaagataatatccaaaatttataatgaactcaagaagttagacaccaacaagccaaataacccaattaaaaattggtgtacagagctaaagagaattcttaacaaaggaatctcaagtggccaagaagtacttaaagaagtgttcaatgttcttagtcatcagggaaatgcaaatcaaaacaacttttgagattccaaatcttacactggtcagaatgactacgataaacaaaacaaaagaaaacaaaacaaaactcaagagatatcacattcaggagatgatgtggagtaaagaaactttccttcagttctagtgggattgcaaacttgtacaaccactttggaaatcaatctggtggtttctcagaaaactggcaatagttctacctcaagacccagctataccactcttggacatatatccaaaagatgcttcaccattccacaaagatacttgatcaactatgaccatagcagctttatttgcaagataaaactggaaacaacctagatgtctctaaattgaagaatggataaaaaaatgtggtacatctaagcaatggaatattattcagctattaaaaacagacatcaggcaaattgatcaaacttgagaatatcatcctgagtgaagtaacccagacctacaagtacatgcatcatatgtactcacttataagtagatattagccataaaatataggatacccatgctatattccacagacccaaagaagctaaagacaaaggaaggcccaggtgaatatgcctgaatctcacttagaagggggaataaaatagtcataggagacaaatggaaggagggaactgggtggaagagggcatggggaggaaaatgggggaggttcatgatcatgtatgggcaggtacaggatcgatggccagatgatcatgtgaatgaatggcaatacataactgactggggtgggaaggtgggggaatctggatgacctaagagaggtttatagagacctggattaggggaggcagtcaagaatcaatgggggtgactataactgtgattcatatcattgatgatatggaacctgaaaaggtcacctcctggaaccagataagaaccccagtggaacaataggcacccacgaaactttcaaccccaattttatactgtctacaagaaacgcagggaaaggggatgcatcagagactgaggaaatggccaaccaatatcaacccaaacttgagacccatctcattgacaagcagccattcctgacactattaatgatactctgttatgctttcagataggagtctatcatggctttcttctgagaggatgtagagacacacagtcaaacaatagggggagcttggggacttttatggaaaagctgggggatggattgtggccctgaaggctataggaactccacagaaagaccaacagggtcaactaacctggttccttgggactttcagagactgaaccaccaaccaaagagcatgcacaggatagacctaactcctcctaccctgcacatatgtagcagatgtgcaatttggtcttcctatgggtcctgaacaactggaacttgagttgcctccaaaactgttgcttatctgtgagatatatttttctagctgggccgcccagtcttacctcagtgggaaaggaaatgcctagtcctgtagagacttgatgtgccagggttgagggattccttggtgggtggtggggcgggtgttccactaacccactggataagaagagagggggtggggaaataattggagaaaggggtgactgggagaaggggcagtgagcaggatgtaaaattaataaataaaaattcaattataacatcacttcctctccaaaaattcacaatcattgtttttaattagtgcacatcaataaaatgaaaaagaaggcaaggtttcatgtcttactgatgagaatattgtattgtataggaaatgcaaaaaagagaattagctggaatgaatgaagtaaataacatgtttagagatgatacctgctgtagagcaaagggagacaaaccataggtaaggcgggaccagggttgtttgagtcttgaaactataaataagttgctcagagaagaattcaacaaggactgggcctctgaagtgaggacagcaagaagatgacacagaaagacttgcagaaataaaggggaagagtattgtaaccagaggaaagtgtagatactgttagctcttagaatgagagcccataagacatagctaccctgataatcctgattgtaatatttgacttttgagagacatcctcagtttgctatgctagagtcaaaatgtgcatttgttatcttattttaagtttttgagtatatactatcttggggtaactgcagaattctgcccaatttgctggtctgtaatgtttgtgacttgagtgtcagcctacatcttcttgtcttttctcataataacattgagaacactccctgatggaagtaaaaacatgtaaacctagtttattcatgcctagtttgtaggcttattagtgatgaggacagaaacagggtcagcagggcacaccaaacagttatattagtatagtttgtataagttgccctacacctttaaaaaagtcccatggttgagtggattagccacattctttctcagattaaagctaatttcctacctagataaggtttgattgtttaatatctgaaacatgatacttacagaatatatatcaactcaaaccattttaagttgcagaaatttgactgtgaaattatttgtgaggcttataaataaagagacattaatatagatccagttgttctttgtaagtgtttagattcagatattccctgttagccatattttgtaaacagacctgaaatgcattaaaataatttgcatttatcctagtctgattggttttagtacttcaaataatcatcaaattcatttcctattctttagataaatggatagcaacctaggatttcaattttcttaaatgtttcaaattttattttcttattctaattgtaaaggtttgaaattttagacaatctgcattctattttgctatatataagtggtaatattcaattttgtcacaatactatgaatacatttcttacctctaacttgcccatttccttctttagaataataagcacaaaagaagattggtttttcaaatagtcatataatgcacatagttttcacttaaaattccaggtggggacacatgcagactgttctttcttctgttttacgatgtaattcataaccataacacatagcaagctgtccatttattcttcaactttttagtctcacaagtacagctgaaatagcaactagcaagaaaactaggttttcagtggatgaattgtttgactccaaagcataggcagtgagagttttgtgaagtattttgacatttgagaatatgaacactcgatattacctcttatcatggacagaacactgtttcctttatggtcctgaaaactcagacatcttgtttttcttatttaatttattcaattttctaaacattttgagttatgattggcagataacaatgaaatgcttagtttccaggaaatgctttgatgaatgtgcacttcagatatggctactacttaaagctaaataacatactcatcatttagtaaacatttcttcctttcatctttgtgtgagaatatttaagacctgtgttcttgccagttttcaagcaatagtatgattcactacagtcagcagggtatacaacgaatttctcgaactttcaagcatgctccatttaccagtttttatttgattaagttaaaaaatgtctcactgttacaaatatagatattattagacagttaaatggcagagagagctaggacaaaaggagctttttggatcaagtagagatgagagttttctggtcattcaattctccatgatttaaaaagccacaattggaattcaatatgaataagtaaaagacatttcctttaaacaactggccatttcttgcccatgatgtacaggatttatatgtttaaccacatagaggaaattccatgtgaatcttgaaagaatatagccctggaatgtagctaggtactggaggccagaagaactataagtaaagcagagttctctgtgggatgaagaagatgaggtaatggtgccttgttttctcatactatccttagactttgtatcttgcttttgatcaataatccatgatgtggaacatatcttaataccttgcaggtgtgacctacgataactatgaatgcatttcctaggaattcccaacactcactggcacatctagaccaaatttaaaaactttcgcctgtttttgccatagttcttagaaagtctgtgcatatctggatacaattgggagtataggacatatgactgaaggaactctgagctgccttgtgagaaattaggaataggatgggaagttctagatggatgcaaggcagatgcaggagcaacaaaacagggatatcatgtctctgagaagcagtgatacctaaggtaagtttctgctttgtacctggtgtagctgagcccagatttctctgccagtaaggaagttgagtacagtattgcaatgagcagtgactctcctgcagtgaggtcagaggcaagtcttcctataagggaccagcgactttcagaacttccacttctcaagaaccagaagtagggtaaggccttgaaaagacaaatattcctttcctgttctggaccatccatggatcctagacttctttgctgtgtgatcttctgtcttcttgcagccagtgagttctgagcaaaaaagaaatcattgaataaggctgtcatgttctttgttctatgccctacgtttttttggtgtcaatttgacctctgctttaactcacttaatgcttttctttgcagcttttgtggatactacggttaagcagaacccaagatacaagcttgcaagagttggaaaaccagtgaatttgatctgttctcagactatgaatcatgataccatgtactggtaccaaaagaagccaaaccaagcaccaaagcttcttcttttctactatgataagattttgaacagggaagctgacacttttgagaagttccaatccagtcggcctaacaattctttctgctctctctacattggctctgcaggcctagagtattctgccatgtacctctgtgctagcagtagagacacagggctacaatatcacctaccctctgttcataaactttttcctttcagagacccaaggattttctctagaaccatccctcttctcttgcagcagtaggaaatgggtttgtggctgtcacttctcacccacagataaaagttgaccataaaccactaaaaccatttgacagttatgtcaagagtagaatagtcgttacatgtgcccagcattcagtttgtgatattgtcatttttatctctaattctttcttttttagtggaaaaacagagaacaacacacccagttctttcatctagataggattcttccaaacacaagccctgttatatgaaggttgaccaaaaccttataaacaggcaagtctctggcatttggagaactctagatgtattttgtagtctataagaatctgttcgttttcatctcagtcaccaaataaatatccatctaatgggaaagggaaattaccaattcctcaagataaaaatattgttaaaaaagttatattggaacaaaatatttatacattgatctattcatagctggacaggaggtgctgttgacatgactaaattgaaaatagttgattaataaattatattgaaagaataaggagaataaattagaggataaagctcttacagtcatctgtatatcaatacatgatcatgacacaaaaggagatgaaatctcaggagaagtccccaagaaaaactacagagtaaagacaactacatatgagagaatctgagtcctttgtctaagctgtgcaagaattgaacagaaaatactcaaaccttataacaggcacatgagagtatatgtttatatattatcttgaaattaatatccctggtgataacggtgttctgaagaaactgacagaaccctgatatagctatctcttgtgaggctatgcagtgcctggcaaatacagaaatggatgctcacagtcatctattggatggacacagggcccccaatggaggagctagagaaagtacccaaggagttgaaggggtctgcaaccctataggaggaacaacaatatgaactaaccagtacccccagagctcgtgtctctagctgcatatgtagcagaagatggtctagttggccatcattgggaggatgccccagaacaggggaatgccagggccaggaagtgggagtgggtgggttggggagcagggctgggggagggtataggggactttcaggatagcatttgaaatgtaaatgaagaaaacatctaataaatattgttttttaaaaaagaaaaacagaaaatataaaggaatagggtaatcttaaacactaatttcttggtcacctctgctgttgacaatagaggtgcagatcaggaggggtccagggtcctgtcctgtcctgccctgccctgccctgtgggtctaaagatggtcgtcaatgtcagaaatcttggttctcccttttatagagagaccaactcctgaagacacattatcttggccctgatcctgcgatggtcatgaccatgttcttatgttctgggacctttgttttccaggacatagtgcatcgtgatcaagatggaacatcctcaccttgaagctcccacatattgaactcaccacccagctgtgccagcaatttctgctcctatcatacacaaggtaccagatcacacaaccttaggctactgctcatgggcacaaaattaaatattatgttgttgtgtaatcctttaagtgacattaatagtctgtccttgttcaaacagaattcaaatatgatttaaagatgatggtcaactgccaaggttacattaaaaaaaaaggtagacaaagtgcctttatttctagttatagtactataatagcctttacagcctcctctaaattgagcctgtgtgtcctgtcctgtcctgtcctgtcctgtcctgtcctgtcctgtcctgtcctgtcctgtcctgtcctgtcctgtcctgtcctgccctgccctgccctgccctgccctgccctgtcctgtcctgtcctgtcctgtcctgtcctgtcctgtcctgtcctgtcttgtcctgtcctgtcagactggagatttagatccataggttcatatccctacagaatggggtcaggccataaactcaaacaggagagaacagagggaggaatcatggaggaaagctgcttactgacttgtttctaggatcaagttcgctatttttaaaatacttccctggatccctgctcaggggtgataccatgtagcacctatagttaacctgtaagccccactaacccaagcaccaaggactttctggaacgctgggagttatagttcttggaaaataataatgcctcatgagaaaatacagtgatgtttgcatttttctttaaataacccctgcaaaatatgtcttgtggccactcaactgggaattccagggaatagacctgacaaaagggcatcctggtcagtatttatttagaagcttatttcaaaatggctcaaaattgtgaaacttgtttttttctggtggatcacaggattaacaaataccacaatgggtttggctcttccacaacaacaaacaatcaaaaaaggccacacaaaaatgcctaaagcccaagctaatggaggctttttcctcaaagttcctcaactgaatagaaatggactctagtttgtatttttaagttgacaaaaattatccagcaaaataaacatacaaatatcaaatatttattgttagtaaattacaaatttatttgtaaacaatatttgacatacatatatttttatcatctaataaccactgaagaaaagtttatagtgataagaaaataaatttgtgtatttttgcaaaaagaattaaatatctgttggatatttcataccacaggatagcatgttcaatgttttgcaaactacattgatatttttattatgtaataatgctgagaataaagatttacatagtataaagtacaaagtggccaaaatttaatgccgcttcataaattgttgtgcattgtattctaattctaaatctaagtgtatttagtcatttcttttaagaacctccagtcatcaactcaaacatcacattttaaaactgagaattccctaagaattgtagtcaaaatgtatttaatactaccttgctttgatgacatgcagtgaagtcatcaaaggctctattgcctggtgctatgtctcagattcatcatatgctttattttttaaaaaatgttagctgaaccttcagaaacattgtaatgttgccaatttctggtgtgatttctcccatgctgttacttcatgtgtatttgcagctcatagctaaagaaattatgtcctagaagaacatgtgatacaatataaggggtagaaatttggtgtaagaagggtcaactagtcagtgacatcagaatataaaaagtacaatgctagataattctctcattgtcttctgcctagctttctcccatatcaaaaaaggacctgtatgtgtccccattttcctaaatgaagtacagggagagtcagtaagatgcacagtaagctgattgcttgtcagacttttgaaataatgttttcattggattcaattcactgttgttatcatcatgttcaattaaaagtgacaaaggcgttagaataagcagatagaaaaataactagggatgcagacagtcaacagatgactattagaaaagtaggaagccagatggcatagacatttctaggaaaataaaaaagaagcaagttctctggaggaagataaggcccaagtacttttcctagtttagggcacagctccaagcattgatgcttcttcctgtctggtgaacttgtgaatagttttggaaaactctgctatcatcatctttatcattatctcaactggattaagaaacatttgcatgattaagaaatatcaaggtgtgacggtagtgtttccatgtatataaggaccatggatggattcaaaatctgaatagaatttggggagaggtgggttgtgaaatatgggtctgttgggagccatatctttggggactgattctgactgtggccactctcttatgactctcttctgattcctgtccatctgaatgtgaagtgctcctctatctgatttctggatgttgagattttatgttgctcttgtcctgggctggctatttagtaactttgagctaaataaacaactcttcccttacattgtttacaacagataacttggtcagagttatgcagaagtaactaatgcacattgctttaggaagtcagaaatcttgaccagtgagaaggctggcatgggattgaatagctatcagtgtaacagtttttaaatagcttttatttcctgtttctttttgtctttttattctattttattttgttttttttcttttgttaaaaataatttttttcatccaatatattctgatcacagttttctttcttcctatgcctcttaggctttccccacctctcctcccatttggacctagatctctctcttgttagaaagcaaacaggttagttcatattgtctctagctgcatatgtggcagaggatggcctagtcagccatcaatgggaggagaggcccttggtcttgcgaagatcatgacccagtacaggagaatgccagagccaggaagtgggagtgggtgggttggggagcaggggcaggggagaaagtataggggattttcagagaggaaactaggaaaggggatagcatttgaaatgtaaatgaagaaaacatttaattaaaaaaaaaaagaaaaaagacaacaaacaggtcttagaacgagccattggaattctgtttaggaatttccccctgtgccaatatgagttcaagtctcttttccattttttttcttctattagattcagtgtatctagttttatattgaggtccttgatccacttggactggagctttgagcaaactgacaaatataggtctaatttcatttttctacagacagacatctggttagaccagcaccatttattgaagatgctttctttattccattgtctatttttggcttctatgtcaaagctcaattgtctgtaagtgtgtggttttattatctcagtcttcaattctatttcattaatcaatgtgtctgtctctgtaccaaaaccaagcaggtttttatcacttttgctctgtagtaaagcttgaggtcagggatggtgattcccccagccattcttttattgttaagaatagttttcgctattctggctggtttttttttttttttttttttttttttttttttttttgcctttccagaaaaatttgagaattgctctttccatgtctttgaagaattgtgttgggattttgatggggattgcattgaatctgtaggatgtttgttgggtggcaatttttactatattaattctaataatccatgagcacaggagatctctccattttctgagatctttgatttctttcttgtgaggcttgaagttattgtcatacaggtctttcacttgctcagttagagttaccccaagatattttatattatttgtggctattgtgaagggagttgtttccttaatttctttctcagcctgtttatcatttgtataaaggaagcctactgatttatttgagttaattttctatccaatcactttgctgaagttcaaggggaggtcccaaacctgacactattactgagactatggagcactcacaaaaagggacctatcatgactgccctccgaaagactcaacaagcatctgagagagtcaaatgcagatatttatacccaaccaatggacagaagctgctgacccctatggaggaattagggaaaagctggaagaagctgaggaggagggcaaccctgtaggaggaccagcagtcttaattgacctggatctccgagatctctcaaacactggaccaccaaccaggcagcatacaccaactggtatgaggcccccaacacatatacaacagaggaccattgggcctgggttcagttgaagaagatgcaaccaaccctcgagagactggaggccccagggaatggggaggtctggttgggtgggggttggagacatccttgtggggacaggaggtaaggaggcagtatgggatgtgggacagtcagagggtgggtgggtgggtaaataaaatctggagtgtaataaaaataaataaataaataaataaataaataacaaaacaaagaaagcaaacaggtaactaaataataataatacaataagaaaaagtagttaaaacaaaacatattagaatatgagaaagccacaaaacaaagaaaaggcataagaaatgcataatacatatgagtacagagacacaaatatttgcatatacaatctcataaaaataaaaaactggaagacagaatatatacacaaaaacttgcaaggtaaaatttttaaaaagaaaaaaatagcacctctgacaaaaaataatgtcctgatttcacattattttttttaattttttattagatattttcttcatttacatttccaatactatcccaaaagtcccccagaccttccccccaacactcccctacccacccactcccacttcttggccctggcgttcctctgtattgaggcatataaagtttgcaagaccaatgggcctctctttccactgatggccgactaggctatcttctgatacagatacatagcagctagagacacgagctccgggggattctggttagttcatattgttgttccacctatagggtgacagatccctttagctccttgagtactttttctagctcctccattgggggccctgtgatctatccaatagctgactgtgagcatccacttctgtgtttgctaggccccagcatagcctcacaagagacagctatatctgggtcctttcagcaaaatcttgctagtatatgcaatggtgtcagcgtttggaggctgattatgggatggattcccgggtatggcagtctctagatggtttatcctttcatctcagctccaaactttgtctcagcaattccttccatgggtttttgttctcaattctaagaaggggctaagtgtccacactttggtcttcattcttcttgagtttcatgtggtttgcaaattgtatcttgtaccttgtgtattctaagcttctgggctaatatccacttatcagtgagtacatatcatttgagttcttttgtgattgggttatctcactcaggatgatgcccttcaggtccatccatttacctaggaatttcataaattcattctttttaatagctgtgtagtactccactctggaaaccagtctggtggttcctaaaaaaattggacatagtactaccggaggatcccacaatacctctcctgggcatatatccagaagatgttccaaccggtaagaaggacacatgctccactatgttcatagcagccttatttataatagccagaagctgtaaagaacgcagatgcccctcaatagaggaatggatacagataatgtggtacatttacactgacttcacattattagacaaagagcccccacagatgccattgagctaattttatgttggttatctatggctgggtatagggcttgcccttatgagaggtttgcgttttcctttagagaaaacaatgttttccttgcaagtggttatcctttggctactacttccgggttacttccgggttagggatgaggtgtgcaccctcttctcttttcaggttgaggatcccatgtggtacaaggccgtgcatgccttgtatatgctgctagctcattctctgtgagtttacaagtttgccaaccctgttgtttctagtgtttgagtgcaggagatgcagtagtgatttctctgacctctttctcagttttggtaataggtggagagcctactgatcaagttcttttttttaattttaatatttttttattatgtattttcctcaattacatttccaatgctataccaaaagttccctactcacccattcccattttttaagccctggcgttcccctgtactggggcatataaagtttgtgtgtccgatgggcctctctttccagtgatggccgactaggccatcttttgatacatatgcagctagagtcaagagctccggggtactggttagttcataatgttgttccacctatagggttgcagatccctttagctccttgggtactttctctagctcctccattgggagccctgtgatccatccactagctgactgtgagcatccacttctgtgtttggtaagccccggcatagtctcacaagagacagctatatctgggtcctttcagcaaaatcttgctagtgtatgcaatggtgtcagtgcataatcagtttggaagctgattatggggtggatccctggatatggcagtctctagatggtccatcctttcgtcacaactcctaactttgtctctgtaactccttccatgggtgttttgttcccaattctaagaaggggcacagtgtccacatttctacattagcaaattcctcggtgctccagaccagccctttgaaatttgagcaagggagctgcagagagacagatgtgagctctatgtcaagcactgtgtttctgagaaactaagagagaactagactctccatgctcttttgctcctgttctggcatctaggttgtcttgttttactccaggtctctagctctcagtgcttccctggcagcttcattagtatacaccctgttttgaccacattccaggtcctgcctcttggcccttcagtcatccagagatgattatgtttagtaaaattcacagatttggacagactaagagcctaaggaatatttcatattctagtacttgtgtctagggatggacagggttgttcttcttgcagcagagtgaattgttaagtcattcctaataaatctattcttacttttcctgttactgtaatgagagggagagagagagagagagacagagacagagacagacagagacacagacagattaagagagaaggcaggtttattttggcttacatttcaaggccattatggttgtgaattcttggtgtcaggagcttgaagcttctggtcatattgcatccaccatcagaagcagaaccagataaatgctgattgcaataggagcctgtattgatgccaagtcatgaagtcaggcagcagaatgcggaggtgtcagtctctgagttttagggaagatcagtggccctagacctaacacatctcaggaactcataaaacgataagcaatccagtaattctcagagaagaataatgacaaggccaaaaagaaaattaatgattaatgctttcttagtaaaagctacttagacttctcatggaagataatttcatcttagctaaggaaaatctctcttgaagagttattgaagagaatttagaagagagaaataaaaatggccctaagattctaagaataaggtacatccatacattttctgaagatcaaagttttccttttttcatggttagagttatcaccagttgctagaacatgtgcacacatgtacacacacacacacacacacacaacacgatcagacatcaacataaagagatatacaggcctacattaacctttctttctaccctcacatatgtctttcccagcagatggcagtattagattcacaaagcaatcttttcagtacaattcattttattttaactttatttaaattaaattttgttgtataaactgaagagaatgcattgagatagtgaaatggttaatagaagcaaaactacttacctgtcacttcacagttattttatttttgtgaaaatgacagctaaaggtttattaagtaagaattttatattgtgatgcgatattaactgcagtactaaggactctaggctcactcatcatagaaacctgccactttatgtttgaagtatgttttcccactattcggcaacattgattttaaattgacattatctttctaaatataagtaagatcatgcactatattttttaaagatgtctggctaatctcccttggtataatatcctccaccataaattgttttgaggcaattttcaggatgtccttttaagggcagatagctacctgctattgtatatatttaccacagttccttttctatttgcacatccatggacccttaagttattgtctatcctacctattgtgattaatagaatgattagatcaggtatttttatgagatactcagcttaactttttcatatacttgtccaggtgtgtctattggtagtcacatttttaatttctttgggaatatccatataaggttttgcatagtggctacatcagtctgcattccatagacagaagagaaggctttccttgcccacaccttcactaagcaacacttgtcatgtcttgttggttgataatagttttcctaatggatatgaggtaatatctcataataggtttgacttacatttctctgatcgtgagtcatctgagacacctttaattgtctgtaggtgagggctctctagttcgagaattttgccaccagaaaaaaaatctcactccttcgggtgcctagggtgaagagaggatctgtgctttctctaggagatggaggattaggatttgaaagttggaccagacaaatttcaagagcaaagactagcatccttgatgtcagtgtctccaaggcctagggattccatccaggtgaaatgatgacttaaaaataaaatcttctttttacagtacctggaaaagaaagtaaatattagaatcattttaattcacaaaagaaaggtctttcaaacccagacatgtacccataattacagagaataatctaaattagatgtgtatgtgaataacaaactgtaaaataagttttcttcaaaactattgcagccattactgatctgaggtgggagggaaggagagagtgaaacccttttttgctcccacagatgtttgttttcaccttcttgtctcttagcatgtgcatctagatgtgactgctggaaaatctgtctcacagcagtcaaaaatgaaaacctgctttgagatgatgaaataaatttaaccaaaagcatgtttaagcatttcaatgtttaataaaaataatctaaaaaggaaagcaacctgaactgtccctctaccacaaatatgttgagccacattgtatgtaattaagaataaaatattcatcatttaaattgaaatacaagattagttttatattaacactattcacagagcagtggacacctcacagcaaactcacctcacagaaagtagctatgagctctagctctctgacctgtggctgaaaatgccctgccaagctttgtctacatctcactcttatgttcaggtctacagtgacactagacttctcacccatgttaccatttgtctccttggagtaaatatattctaaaccaaagaatcaatatcactgggttctgtaacactgcctatatcttgtcttaaaaaagtataacctggacctataagatattcaatgattttctggtctatactaatttcactgtggagtaaaaagcaaagttcttgtgagtattgagggaaatataagggactcaaaggtatttgaactcacattaaacttcaattacttgtctacttcatttgaagacacacattacagctctgttctgtgaactctcttctttttcaatgtctcaggaatgctggtgtcaccacgaacctaagatacatggtgaggaagagatgataggatgtgacccttcgaagtgaaagaacacagtcatgttatatggtatagtcatggttatatggtataagagaaagatgtgaaatttgtgacttctgttcagaaagagtattagagaggccaggaatgctggagaaatcgttcttggataaatttccccaagaggaacccaacatcctaaagtggggccagcagatctggaagatgcagagctatacttctgtgccagctcctccctcacatcaatacttctaaatgttttctcaccttacagcagtacagctgagggaaacacctctgtgctaacagcatgccgacctgaacacactctgcatgttgtggatgaaagtaggggattatcacaggacatggaacatcccagctcaccatgcttacggaggaaaactccacaaataaagcatgaaggcttaagatggtagcaattgttaagataaacccgcattgaccaacacagctctcctttctccacactgtatatgaagttaaatatcatattttacacatgtaattttatgccatccaaaggagagttagtaaaggaaaatagtttattaatttcatcacaaggaaatttgtttctaccagttaggtttctttctctaaaataagagtaaatgaaagaaaggaaaacaaagattaacagatgacaaggacaggattgaaatccaagtatgttgagtaaaagctgtatgctttggattataacatgctgtctggtattccttattgcatagtccttactttgttcttcaagaagttcccacacaggcttggatagaagccaggatacataacttctgctacaagattaaaatgtctaaaaggtggggcagataagtaactcactgggtagagtgcttacctagcatatatgaaatcctagattgcattcccagctctgtaaacctggtggcggctcatgtgagtaaccacagtctataatcagcacttgagaggtagaaataggagagttagaagttctaggtcatctttagccacataatgagtttaatcccaaccttggctacatgagaccttgtctcaaaaataaaataaaccacaaaactggagtatccgagagatgtcggaagttgaactgtatataacctagaatacaagggaatgctccagccacagatattgatcattgaagtgtgacaccttcactttttcagtgaatttgtgtttctttgatggtttgtttgtttcgttcatttgtccattacatttgtttgtttcatttgtccactattgggtaccaggaattttttccagtctgcttgtataaaacaatttgtgaaactcaaaagacagacaaatgcagagttatttcaggtggctggacctgtgacaagtccagcatctccagccaggaagataaattatggtgttgctctgcatgtttataaatcctgattttctcaaaaaacaaaaaacaaaaaaaaacttcacgtggttctggttttgtctcatccatctcaaaaagaatgatgaaagaaagaaagagagagagagagagagagagagagagagaaagaaagggaaacaatggatgagtggaagaaggaagaaaagaaaggaaagaaggaaagaaagagagagaaaaagagaaagaaagagcgagagagagagagagagagagagagagagagagagagagaagaacaaagcagacaatcttcccataacacagaagagagacaatggtggcaggagacaatacttgaagaacatacccctgatgaccccagaagaacaggtgtagtgaaaggggaggtaaaagtcacctcttcatagcacaaggcatacggtttatttatttcatattctgattttatttattattagtattgtgtgtttatatatgatatatgtgtgcacacatgtcaggtggacacacccatgaagatcaaaggacacttgtgggtgttggttcacttctaggaactaggcttgaactaagggagttaacttacgcagatcctgtttttactggctgagtcattgtgcctgcccaaggcttctgacttaaaaggacacttttcaaaaagtattgcttttaagcatttgaagcacattttgaacatctcaagtagaatattcctcctactctagccctcatattgagccagctggggcccgtggcaagctgctctccttgtctctcttctgacttaaactcagggtcaaagcacctaaaataatgatgattattattatagcaacaacaatgataataagaatataatcctccatccaaggaagctagagtgtcctttgacaaccatttaaggaaaaaaggaggaaaatggggaaaactcacacctcacaaaacacaagttacaaagactcacaataaacaatcaaacaacaaacaaaagatttcatacacaaaagttagaaagagctaggtaagaatacttttaaagagtatttcaacaacacaacagcaggattggagcctattaataaaagttaagaagaaaagcagcaaaaccaaaaaaaaaaaaagaaagaaagaaagaaagaaaagaaagaaagaaagaaagaagaagttgactgaagagactcaagaaagaaatgaaagaaaaaaatcaaaataaataaatacatgtgaaagaatgaaccaacacaaatgaaaatttagtaaaaaaacatttgagaaagacaacaaaatgcatgcaggactggaaagggcttaaagaggtaaaaccaaccaaagggaagaggctgaacggtaggcaaaaggaagcatggaaatgagatgggttcagaacagcactggtagtcagacagggctggcccctgggccccactgtcccacaattccaccacagatactctgcacacaccctgggagagctgaaggctgtaagctaagcctgcagccatttataaacaagggtatataatcttcttaacggtagtcaaaaccatgcaatctcaaagatgcaaaccagagggctgaactgagtaaggacagcccctcttctcagaactggtgcagatgcttggagccagtgtctggctctctggtctccctctccttctgccacaccaggaagctccttttgaacatctcaagagtcttcctaccattctagtcatcatagttagccaggtggagcccctgcatagcgcgtctccttgtttctcttttaactaatgcccagagccaaagaaagtccctccaaactatgaacaagtgggttttctgctgggtaaccctttgtctccttactgtaggtaaggctctgggctctctgggttcctgttgccgagtgcacatcttaacccccctgccctgggtagcagtgccaaaccccttccagactgattctttttcttttccagagaccacacatggtgatggtggcatcattactcagacacccaaattcctgattggtcaggaagggcaaaaactgaccttgaaatgtcaacagaatttcaatcatgatacaatgtactggtaccgacaggattcagggaaaggattgagactgatctactattcaataactgaaaacgatcttcaaaaaggcgatctatctgaaggctatgatgcgtctcgagagaagaagtcatctttttctctcactgtgacatctgcccagaagaacgagatggccgtttttctctgtgccagcagtatagcacagtggagcacagctaccccctctccatgcataaatgtgtccaagtcctgctttccccaccaggtggctcttaggtcctccccaacccctgtactttcagttcaggcaggacttgaaacaaagtagctaccgactactgtactttttgtggaatggtgcaaaattcaatccattcattaaattatcttttaaaattgcatacatattcataatacataaatatacatctattaaacatacataagagaaggagtcagaaagaaaagagaagacaggtgttgatttttagtacataaagctttcctttttttagtgaacactaggaagaaaaaattataccttctcttggaaaaccaacaaaactgcagtgggggttggttggagacagagagaaagagacagagacagagacataacgagtcatattatgtgtgcttcaattaacataattggagtgcaggaactcctgtagctggtttggtctgagaacgtctagaagggattcataagacttaaggtctgtgattaagagaaaagaaattatgaacaaacaagacaagtgtgaaacaggtaataggatgtatgaaagaagagcgatgagatcaaatcaggaaggaaggtggacaggtccacactacttcagatgttgtaagaaagggggggggcatttagaagaataaagtgtgttacttaataatacatacatatacaagtggggccttcatttggcttctgtgtaggaggaatatgtaaatctatgtctggctcttataaaagtgatttgtactgaagaggaatttctgagtcactgctgagcagacaggtggtagacaaaactatgccaatgaccttgatgtaagtgttcttccttcatgtgttaccatcttatcattgcattagaaaactaatgttaaagtttaggattatgtttgtttataaatatttatatgaccacatagctctctttctcaaaatatgtaacagagacttctgctatccacagcatacaactgtgattgcttattgaaatgggcttttaaaatgttgagtagtaatgtccaggtttctgtggtgtcttttagtctcagaattagctaattcagagatttgtaatatagccacagcagttatattaacttgggatttctggagtacctttccagcgtatacacctttgattctatacatcccttttagattttttcttcaatactggatttacctttgagttttcctcccaactataactcaggcaatcacacaaaggaaagtttcaaggatctggtatgtactgtcttagggtttctattgccatgaagagacatgatgaccatgacaacttttatagagaaaagcacttaattggggcaggtttaatccattatagtcatggcgagaagcattacagcatgcaggtagacatggtgctggagaggtaacagagttctacacctggatcagcaggtagcaggaatggagagtgacattgggcctggcttgaacatctgaaacttaaaagtctataactggtatcacacttcctccaacacagccacacctactcttaacaaggccatacttcctaatagtgttacttcctatgagcctatgagagaccctttttattcagaccaccacagttaccattcttgttgctctaatatcatgctaccaagaagcatcttaaggaagagagattgattccagcttagaggtttgtatggtgcagttctgtgtaggtggagaagatatgacagatggaaaatattggtctgtggaagtaggggttataggaccaccttttcttatggcaccaaacagcaagtagagtgcttggataagaactacaaacatattgtctttgatgattgctcaagcatcttaacttctactagttaggctttactctcaaaggtttcataatcttcccaaacagaactacaatgaggcaatcaagtgtttaaacatatatgtctactgtaggatacatttgatatttaacctataacataccattctgggccttaaaaggctaatatttttcctataatgcaaaatacattaagtgaaacttctgtaatccacgtaattcaaaatttcagcaccatccaaatatccaaaatctaatgcattctaagattcttaagattcaaggcattcttttacccgtaccccactctcaaaccaaaccaaaacaagttacacacacatctgttgaacagtgggatagaataaagactcccattcagaaatttgctatacagtgacacagactaaatactctcattcacaaaagaagtggaggatagcaagaaaaggacagaccagagcagtaaccagagatgtaatgggctttggaagtctaacatgaaaagtagtacttttattcaaaatgcccctaaacttgaaatatacaagtagccatcaacaatggaatgtataagtggattgagttatactcagtacataaggagattcatttaaaaacctgatatgattggaaacaagataggtgatgtggaagaaaagattatagacaaagaaatttgttctaatgatgtctgaaccatgatttcctttggctactatcatctgtttgtcttagaatggataacaaagacttggaactctagacatttttttatatcttgatatatgtggtgactacttgaatgtatagatttggttgagctttgactattgtctaagagctatatggtctgtgatatgcattgtatacctcataagaaagctcagaggatcccaaggctcagggactatctttgaaaatgggcagaaaagttgtaagatacagagtttgtggagaaccggacagatacagggtcttctgggcatgggagtacccagcactcacaaactcacagcagtcatggttgcttaggagagagttgttcaagatattattcaacatctcagcttggagtggggagggattagcggcctcataagtgatggtatgtcctatggtggcctcatcatgctacagtaatgacttcataccatatgttttggtcagtgcaaaataaattcaatggattattaagaaataaaagaaaagaggacagaaaattggaagtggtgaggggtagaagtagatcttctgtgaacatggaagagttaggggaagcagtaaagggtggctatgatctaaatatattgtatggatttatgagattctcattctcaaagaactaataaaaatgtgattttcaaaaggaaaatatttgatataagtgtgagtgctcaaaggagactttggtcaggtcacacccttaaaggctagatatcacaattatttgaacatttgttattactttgtaagtttctattaatactatttcattaaatataatgcttatttagtaattatttactatatttagcttcactgtctttatgatttttcaatagtatttcatgtacataaaatgtaaaattaatcttaattggattctgtatggtgtttcaacacacacacacacacacacacacacacacacacacacacacacactagtgatggtttaatcggattaaacatacctagatcctcaaacatttatcattgcttacggtggaaacattcagagcctattcttgcagcttttaaaaatattctctacattgggcagtaggacaccagaacttctcactggggtctaactaaaaccttcttttctcagcctgttgtagctaggatcctttaccaaggttctatgtggtgaaccatttaattctacatatgagtgagatgacaaagtatttacattttgtatatgtggtttatctctcacagtaaaactatccctgtttccactgtactgttgcagtgacagaacaccatcttgtggatgaataatatcccatttgaataattattactgtataattttagactgcttccctttgtggagaatcttgtgaatgataccagagtaaatgtgtgtaagtacagatgtctctaacatacgtatttcatttcctttggaggacttctggatcatatgcaatgctatttttaagttttggaggaaattccaaactcttttgtaatggctctatcaacttatatcccaaataatcgagtgcatcaaggtttgttctccacacctatctcagaatttgttaacataaatattgtaaaaaattattttaagtgtatgattgttttgcctgcaccttatgtctgtacaccatgtgcatgcagtgcttatggaggccataaggtggtgtagaatcccctgggagggcagttgcagagagctgtgaggttccgtataggggccaagatcaaacgagggtcctttggaagcacagccagtcttacagcgcctaagtcatctctccagcacttcatccacagtttctgagcatagtaattattagaataaggtagcatcttgtggtgtttttatttgtatttctttgattagtgtgttcttagtctttaagggaatatttcataagcattatgtaatgtcattttagtctcaagtttttttcaactagaatgctcagccttttgctttttaatgcattaaaatgctgtaatacataatggctattatacttggatttattttcattttttgcacatttatttccctacattctcttttcccctcattttatgacttctttcgagtaagtttatcttttttcattgttcttttctaaaaatacatgctctgttctattttttgatagttaactataaaatttttatcacagtaacaaaagctgaaattaatcttatttttatgtttcccttggagcatatataaactttacaataacacttttattccctttttggttcctaatactctagatgatcagaatttttggtctgtttgactttaatggttagaagtattatctttttgatagtatatagagtcactttcctggataaataatctatagtcagtatctccactttatagcttttctgtataaatcatctaagggcagaaagttcataatgctttgcctcttccctttaaacatagtacttgctgctagcctttaatgctaatggcaaacatattttgagcaaagttgtaggagtcccatcagggactatcagaccacaataccaaggtgttttttgttatttgttcttcaatcctgtgatccctggctctttatcagtgattctcacaggttttaagatattaagtctctcaaataccaaaaaacatagacaaagacaatgacactgagatattctaggaaaaataaggaactaaagtacaattttttgacaaaatatatggtttggtccatggctaattcagaattgtatggcagcattggtgataacacaaatattatcccagttttaactaatatgcaaccagaagagaaaaacagctggtattcaggaacagataattgattgtataaatcaggcctaatccaagtagaggcaaaattcgattaaaacaaaacacaaaaacaaacagtgagttaacattctcctgtctgactctggcaaagatggatggatatgtgaggtttctggctatgaatcctgactgtcccatatgttctcaggaaagcctctcgatgcaggtccctatggatcagtaaggagagctggatattgaaaagggaaaaccctgaacaattgggaatttactgataacttttgtctctatcattgctgagattgaaattgaccagttttacaactgagctataatcatagcctagcactttcgaccttgtttgtcatggcttcagaccaatagtggcattcagtaaaatgatggcagccatttcccttgcaatcccccccaccaccttaaacaattccaatcaagaactgtatcaagacagaacttcacagaaacctactccctgctccttatctaattttcattccaaaaaatgaggaagatttcttcctctgattccgaaggcgtccaaccccttctacccagaaggcatctcgaataagtctttcttgcctgttgcagaaaatgagtagtttccatgtggtagccttatactgatgagactcaagtcagacattaaaaggaggatggccacagcagtgggcaactactcttcaacaactacattaacgtaagtgtgggactaattatgtttataacaataaaagctatttccataaacacaaacaaaaatctgacaggtccgttcttaagtacaccttcctagtgtacttcagcatcaggaatgcaggtgtttaaatgtaatgaaagcacagtcaggagattgttatgtaggggaaaaaaagagtgctttaggaaaagcaacctaacagaaaaccctctagctcgtagtgatttctgtgtgttttcagtacttacccattaaaaagattaccccacccaatattaatccagcacacacaaaacaaaatttcttaagcaccataggccagtgattggccagaaactagtgtgacctctattatagtaaaatatttgtaaattattatcaataccctgtttacataaaggcatatgaccataaatggaatattgttacaagtaagttcaccgattttaagaggatttcatgttatattgttgtgggtataatgatgatgtatttagaaaataggtgtccttatcaacattgtgaagaacccctgaacttccagcctaggcactggcctgggcattgtgggttaatgtgacagtgtcaatctgcagttctagtggttaactatgatccatgaaagtcttagggtaagtactttgaggatattccaatggaagcaaaagattgattctaatgcctttaccacccaagcatacatcatttccatttaaggaacatatttatgagggtgctcccccacctacccacccgcccctgcctcagtgcccaagcattcccctatggtggatcttcaagcctccacaaaaccaaggggctcccctcccattgatgccagataaggcaatccactgctacatatccagatggagccatcagttcccaaatgtgtactcttcggttggtggtttagtgcctgggaactttgtgggggaggggtggtatctggttggttgatactgtcattcttcctatggttatgcaaaccccttcagctccttcagacctgtccctaactcctccattggggtccccgagctcagtccgatgttttgtggtgtgcatctgcatttttttgtttctgttttttgtgttgttgttgttagatattttctttatttacatttcaaatattaccccctttcctggtttcccctctgaaagccctctatcccctcctccttccccctgctcaccagcccacccattcctgcttcctgaccctggaattcccctatactggggcatagaaccttcacaagactaagggcctctcctgccattgactcctatgctacctatgcagctggagccatgagtcccactgtatggttggtggtttagtcccagggagctctgggtgtactggttagtttgtattgttgtttctcctatggggttgcaaaccccttccattccttaggttctttctctggctccttcattgaggaccctgtgctccattcaatgaatgtctgtgagcatctacttgtgcatttgtcaggcactggcagagcctctcaagagacagccatatcaggctcctgtcagcaagcacttattggcatccacaatagtgtttgggtttggtgattgtatgtggaatggatcaaatggctcagtggttaagagtactgactgctcttccagaggtcatgagttcagttcccagcaaccacatggtggctcacaaccccctgtaatgggaatctgatgccctcttctggggcctctgaggagagatacagtgtactcacatctgcatttgtattagtcaggttcttgcaaaacctttcaggggactgctataggaagcagggagggagaggtgatgggggtgttgtggaggggaaactgggaagggggataacatttgaaatgtaaataaataaaattaccaataaaaaaaacttgcccaatatggtagaatgacttttatgggtatagaattttaaggatatactaaagatagtatttggcatatgcttttctctctgtccttttctaacatctccaaaggctaggatatcctagaaggtgtaggtgacagagtcagaatggtggggagagaatacataatgagaaaaggagaagcatgccatcaggtgctctcttcacctgagcccactctagccaaagctaaccactgtgagtgacagcgaaccaatgtcttaagaagtatgtcacatgaatccaagccaccaagcttctcagtgccttgttctctctccagatgacaacccatcacatcttagactaaaagcactttcttttcctgttcatgtcagtagacggaaaaaagagagttgtgttttttattttattttattttattttattttattttattttattcctcttttagttgaagcgcttgcaatcccagatcttgatggggaaggaccaagaggtgaagttaacctgggcaacatagtaaggctttatcttttattaaagacaatattactatccaactaaaatgaggagtggacaccagtagatagaaaaatgttaaagtctagataaggtaactgaagcgggatattacttgtattcattagtcatgtattgtctggaggcagatttttgcagtacctcctcctcatgaaaatgcagaatacttaaaaacatagcaaaacagaattttgtaatgactttaacttcatccaaagctcaagatcatgcctctgctcatattcttactaaggaatgagtttgaggatcctagagatgggtttctctgacacgtaggccgttaagaaagaacctccaataaggtactgaaagtggcttccatgtgctcagagactactagtcccagtcacacataaaccaactattaaagaaaaaaagaaacacacttcatcatttcactggtgtagacatcagtgtgttttctgcatttaaaagtcaatcaggaagattctgaggctacttgaggcatgtatgtttcttcaagactgatgtgtcactagcaaggaccaccaccaggggcagactccagcattctcaggattaaactgtcaagcattctttctcttagagctggggaaaggacttggtcagacctctcttaagcgaaggtggtgtgaagtcaacactgaagatgttactgcttctattacttctggggcctggtatgagccatgctataccttgaagtttgtctgtgtgagtgtgcatgtgtatgagactgaatgtctgtataagtgtatgcgttatcctgagtgaaatagtgaagattctttgtcaatcatttgtgctgatcagatgagatggcacatctggggccacctaaggtgtaattatcaacaccatccacggaaagtgaaggactgtgaattcttgagtatctcagaagatacttgcataagtgcaaggaggattttccaggaacttaaagaaaaatggagtgaacccaaattttctgggattatctttgactcaggctcattctacttctggggcttctgaagtctttaataatcctgccctctgttttggcaggctgtgggcttggagcactcgtctatcaatatcccagaagaaccatctgtaagagtggaacttccatgaggatggagtgtcaagctgtgggttttcaggcaacttctgtagcttggtatcgtcaatcgcctcaaaagacatttgaactgatagcactttctactgtgaactcagcaatcaaatatgaacaaaattttacccaggaaaaatttcccatcagtcatcccaacttatccttttcatctatgacagttttaaatgcatatcttgaagacagaggcttatatctctgtggtgctagggacacagtgctggacaagaacaacacacttcagcaagaacctttgtgatagctttccttcctcaccacacagaaactttaataggtataaggaagtaaaaaccacagctcttctggttaagacatctgcgtgtacatgagagagagtgagagagagaaggaagaaatgggagggtacccaggagggagagcctttgaaatgatgatgtcttccacattcagggtgtggtttcttattaggttaaaaaaaaaaaaaacttacaggcagattagcaggccaacgtaatctatgccctccaccaagagtctctctttcccaaatggttctagatggtagtaaattgatgttgtgggacaaaactttttctggggaaacagacaacacaagtctactcactccagctagagattccatgaaaggctgaagtacggataacacccaagtccaaattggtgaaccagtgagttttcttggggttacttacaggtctataggtaagaggttacttacaggagcagaaacaactcagacaggttcattgcaaagcctacctgggaacctggatcatactgcacagcctgccggcagctagacaggttgcagagtggcctttctgagggactctggtctagacatcttttaggctgctaaactactttctgcttcttccaggcagatagtcaggtctcaagagtcttctttgcagatttttctattctgagagtcttctttgtaactcggctgctttccctctgagaggactctcagcttttactgctgagagtaatctggtgtgtgtgtgtgtgtgtgtgtggtggtggggtgctagagatcctgtcagtttcaggaacttctgaagctagttacattctttcttaaggagcatcctcctttaggatggggtactttaatctagatggaaactgtgatacaacggttggcaattaaactaaccatcacatgttccttgaccttgcccaacgtgagacttaacaaaatagagtggagtgctagttacttttgtcaaggctatagccaaatacctgacaaaggtaactttaaataaatcaaagtcttattttcattcatgattgcagaatataatctgtcctgtctgtgaaaaaatgcaggcaaggatttaagcaagataatgacatttcagcctcccataagtgctaatgcccagataactgtcccatctctatccagttcatgtcatggtgccactcatgttaggggtgcattatctttctttagccaaaccttccaggaaactgtctcatagactctcccaggcatatgtatacacaatgattttaatccagtaacaatgaaaattacccatccttgtcaccttgatacccaaacacgttacattaactcacaaactttccacccttaactcacaaaatctcattttcatttcataatgcaaaatcaacttagtccatcttagcagacccttaaatcttaagggtcattcaaacagcgaccaaagccaaagattatcaccgatttccacatgttaggcaatgtcttttactgtgaaccaagaaaaacctttctttccttaagttgttctgtcagggtttctgtcactgcaataagagaagaataactaacatggatgataactgttcaatgatacatttgctctgaatacatgttaaaaatagcttattggaatagagagcagttcacaaatagtgttaggccaaactgcacatggtttaggtactacaatgggtgtttcatgtacgatgtgaagtgtactgtgggaaaacattacaagttattccccaaaccaagataaaaagattgatcatttaggtatatttgtcagtttctgacttgctaaacacctgccaaactaaattcttgtccttgttttgtgtcgttttgttatctatgaccagtcacactgattcggttttggattaatttttctaagaatccagtgttcaagccaataatgtctgatggcttttcaattcacgtgaacaggaaaattctgcaatgaaaatggagccatgtgacatttacacattgactctgttttgctcctgatgcttagataacacaaaaggttcagttattttggattatgcttattaactctgaaactaagaactcaattgcttctgcttctgtttttccagttgcttctgcttttatttttttttccagttgtttctgccttgataaaatcactagtgtagtacttctcaatatcaaatagcaccaatgacatggacctttagaaaatatgtctgaagtatggtgagaccatggtaacagggctattgcccggagtaatttatttcccttaaatacaatgatctgacagctatttaagtctatcactacagagagccactgtgttcagacctgctgcccactccagctggtgactggagacacagtctgctgctcctgtgcattgctgaggagtatggcaatacctttgaatataatacagtttggttttgtgttcttgaatttcctgaaggaggctcatagaaactatcttaataacattatgatagttaatgagctccattaatgagcaagtgtttttttaaaaaaaactttttattgatttcttgtgtcatatcctgaacctcagtcccaccttcatatccccctttcacccttgcaacttctcctgcaaaataacacacacacacacacacacacacacacacacacacacacacacaagcagcaacaacaaagcactgaaaacatctcatagtggaagctgtactatgttacagtgtgtcccacagtatatcctttggtctatacttctctgcttgcaaatgatcattgcaatgagttgtttctctggaccaagaactctggcttctgtaacaccattaatattttatcctctccaagactccttggattatcctgttgccatggagaccctacagccctggatcagcaggactggccccttcacatatctcaatcatttgcaggtgatatagactttgaggtggtccaattcagagctctggatctgggcctgtgtggcagctgagcttgtcagcatgcctgctttcccttgtctgcactatcatggcaatctctccagcactgctctgtgtaggccatgcaaagccaccattgtcaggaggcaggatcaactattctgctctcacaccctcctggcaggttacattgtgccttcaccatcaggatcagttctattgtgttggctaggtgaggtgcagtctactctcccaagtgctacaaccagtgaggaggcagggctagctccccttctcatgaccctaggaccagctcttgctgctgctgcgggtagtggtggtggtaggggacgcaggagggcatcacgttgtcacctcatcacctcatgctagatgagtggtaagacaaactctctcaggctctcttcctctgaggcatctgtcatgtgccccttgtaccagggccagatctactgtgctacctggaggaggtgcagggctttatctccttagtgctgcagctggagagggtcatggccggccagagcactagctctcataacctcggggccagttctcctgactgcagcaagtggtaagaaagaagacacccttgcaacccatatcacctcacagcatacaagtggcagggacagctctcccatgctcccactctcagggctgctcacctgcactcccatcatcaaagccagctctgctgtggtgtccaggcaaggcaaggcgaagagcctgctcttccaaatgctgcactggtgaggagcagggatagctcttctgaactcatgaccgcaggtggtgaggggctgcacttgtatcaccccgtggtagatgagattggggttagtttttccacactaataaccttgaggctggctcacccccacccccaccccaagagctagctcctctgtgctatctgggagaagcacaaggctcactttcctgagtgttgccagtggtgagaggtagggccagctctccaaaccacctcatctaatgaggggcatggcctgcaaaacatactgacccctgcagctgcatagccatggacccagacatggctcatagtccccgcttaagctgggaagagacccagatgtacacacacacacacacacacacacacacacacacacacacacaccacatcgagagagagagagagagagagagagagagagagagagagagagagagagagaaccatgcactgggctatcttgtaatggagatgctacaggggaatttcaggagatgctatgtgctttaggaccttcctttctgtcctgatttgctttccgttgctgtgctaaaatactgaccaaaaccaagttggggaggagatggcttatttggcagacacagggtccaaccatgaaggaagtcaggacaagaactcatgcagaaacctaaagacagagactaaaacagaaaccaagaaggaatgctgcctgctggcttgcttcatttgttttcttaaatgatccaggactacctgcccatgaatagcactaccctccaatatctgttttaaaatgttctatatatgtgtccacttccataggccagggtgatggaggtaattcctcagttaaggtttcttcttgggtaactataattgtgtcaagttcacaaaaactaaccagagcaattcccttggccatgaacaacatacttttattctaaggttccatttcttattcaacacctcttttatgcacatgaggttaactggcattgccattcagtgccacacaacaacactctttggcacagtttatggaactttcacccaattgctatagcacacagatctcaggtgtcttcatttgattggctacttcacaattgctagccacagataccacccctagaattctattttgattgactaatatctattctgaatacccataaatatttaatgtatttttatcagtaatttacactctagttaaaaattatcttgtttttaacaaaaattgatgtgattaagtttttacaggtggccctggaatatctgaagtgcttgacattgtacatgtaattcatgcccaaaagaattgctctagttattttctttttaacaaaagttatgagaaaaaaattgtaattactgtgaattactggtttatattgatatgagccaaatatattaagtgggagtggggataatgaaagcaaaaagaactttaagaaagatgaaagagcttttgaaaaactgttcaggaaagaaattgtcataattaatgactagaaaggggccagtaatgaagctgactcagataataattttattattcaaaatatgagaaaatgagtttaaaaagatgtttaggacatgtttaaaaagatggatctaaaaacttcagaactgattaggcatgagtatcaatatataaacaggaggtttggaaatgactattgcaggtagacgaattagggaatcatgggaagaagatctggagttatgttaggattcatggagtgcagatcctaggaatatgttgaaatcattccaatgtactcatcaggcatcagaaaatggctagtaggagaggcatgcatttgtgttatttagtatagtataggaaaaacatgtccctgtcacaaagggtcaataaaaagagctgatatagatgaatttgctattctgaacactaggaggcgatgtaggattttctgtaaaatactcagtgtggcttgacttacagagctcatacaaagcctcacttggaaagatttgtcagactgcttggatgctccaggggagatggatcaaaagagtaagctgagatatctgagaagttagtggaataaaatattagattttgctatccccagaacatctactacagatgcaaaacctgaaattatttgttctagtcatatatgatcaatatttggtcaataattaagtaattgatcaacaccatccaaaccttctattaaacattcttctgattatgcagttagtgtaacaagaagaaaggtgaccatgaaaaaggagataaaggaaagaattagtgggagatgaagtttaaacagacagacagacagacagacagacagacacacacacacacacacacacaccacatacacccagagaaacactgcaccactaacagctaacttcagtacatttactggctataacacagacataaagggcctgttttatttatacacacaaaactcttagtatataataacaaacggtttaaattggaacattttgtaagattatacagatagagacaccttagaaatatacaacaattaattttttaaaaagaggcaagggcagggcatggtggcacatgcttttaatcccagtacttgggaggcagaggcaggcgaatttctgagttcgaggctggcctggtctacagagtgagttccaggacagccagggctatacaaagaaactctgtctcgaaaaaccaaaaaaaaaaaaaaaggaagggcatatgggaccaggaacaaatacactagaaaataagcaagattttaatacaagaaattacttagattacagaaaaatacatttcagaagtctgaaataagtggaaatgtacagtgtggtcacaaataaatgagcccgatagtgagatttcccacccttagcataatcatttaagtgtttaggacaacactaagtacagtcacaaaaggaagctctcttttgtaaaaattggagaaaactaaaatttaagtggataaaagaggagtataggtaagataacattgaaaaactataaagcaaagtaatttgccctgtgctttgaaaattattttcaatatatagcaaatggaaatagtcaaataacaaaataggcatttatagatgaatttaatatgtaatagaaatgtcactgcagataaaaaagagagtgttgtggtatactatgaactaatctagaacaagtggtttagcctacaagaaatgataaatttaaacctttcttcatgggcataaaacaaaatacattacaaatggattaagtgcttaaatgtatactcaaaatgttaagtaccttggtagataatcatgaggttgaatttggagaatctcttgtaaataatacaagcgtgtgtataattaaaaaaaatgtaatttcaacaaatgaaaactgtaacaaaaatcatttcttttttttatactttttattaggtattttcctcatttacatttccaatgctatcccaaaagtcccccatatcctcccacccactcccctacccacccactcccattttttggccctggtgttcccctgtactggggcatataaagaacaaaaatcatttcaaagagagtataaatgcaaatcatgacttggaaagaatagcaagaccaccaaaaggagtaatatgcaggagatacaaaaataccatgagtgaaaaagctaatcagccaaaacctaagggacaaagggccacttctaggacagacaagtagcctatgaatgtaaaagatatcaatctctttgtcagacacaaataaaaattaaaattttattttaccatgtggcaaaactttagtttaatagacaaaattagagaactactgaacatcagttaagccagggatgtggctcattaaacacactcataaagtactgggataattatttgactcagttaatccagcaaggattttgtcatgctgtgtaaagttaatgtggctgtgtgtatatttctacagtgagaggaaatcttgccatatgtacagtccagagccatgtacaagacatgtaaaatattgtttgtagtagtaaagattctactttgatgaaattatcaagaatggttaatgaccttcaacaaatgagtataataggatgctaagtatgaatgggaatgaattgactacgattgttcataccgaaatgaatccaaacagaaaataacatcctagactatacaaatatacaaataggataactcttttgagacaaatttaagtggcatataacattgcatgacataattcaatattcatatgtaagtattaaaaaccacaatgaaaacaaataaatgacaagtttactatctgcacataactgagtgtggtgaaatctaagaccattatagactcaaaacttctcagccataatctatctcttcagctcactgtttaagtctgaaagattctcgaattcccggccaatgcaccaaatgaaagattttcgaattcccggccaaatgaaagaccctcgaggggagaccctcactcagacactcaagtcccgggacagccgcgtacccaagaagacactgagaccatacataaaatgtagaaggcaagatttaataaagtagcaacatgaaagcacacagaccagagctctggggtcgaaataaagcagcaacatgaaagcacacagagctctggggtcgaaactcatacacctttgcacagggtagaggagtctcgacgacgactcaaatttttcacaagcttttaaaggaaaaaaccacaaactgggagggggaatggggagggaataggggaagtttaacaaccacaagtttactcaaccaaagagtcatatcctgtgattggcaatacatctggcctgttgaaacattctgtggttgttccagaaaatgtttttctcaagtatgttttccagatgggagggggtgggctccgaggtgaaagttcatgttctcacaagaggccagtaatttttcattcttcattccccacttcttcttgtaagtaattctaatcttagaatttcagaagtctatatctctatgtggagaatactgcatttactctatctttaacatgggaacaaaaacagaataaggcggattagtaaacagaactaggcagggacccttttagtgaggcttgagggtctcagcatgacgcaggtgtacgtagatcagatctctggctggaactggtaagatgtccttggggtacccagctcgttcactgtagccagttgtgaccagacttttttctgcaccacctgtaagccttttaacagtatacagatcattattataacaacataggtttaaacacattatttaagacagtgatgggcataggagccccataaaggatcttaaaaagagtaaaaccgaatcaagagtgagtattctcagttttaaatagggcaaggggaaggggcaccaagtaagtctgtgccagtctctaggattaattttgtcaaggtctgtttagagttttatttattcttttttatctttcctgagctctgaggtctgtacacacaatggaatttttatttgacctctaaatacttggccacaccctgacttacctgggcaacaaaggcaggaccattatctgacactattgcttttggcactccgaaccttggaaaattttctttaacaatcttcttgatgactatctgatcagtctcgttttacaaggaaaagcttttatctatcttgagaacgttcacaaaaaccagaaggtatttatacacatattttttttttcagtgaagtctatttttcagtagatgtcaggtctgtcttctcatgagaggactagttttttttttcagtttttactattttatacagggtttcttttaccagtcttaatttgtctataacttgatagtcttcagactgtcaggatcattgctctttaggatgcctgggcggttagatttgccacctgatttttttttttttagccacagcatcttaggtctttctctgctgatgtcaacagctctctttgtctgtatattgctctgtacagtggcaagagcgtacctgctgtcagtgtagacttttcttttaccatttatagagcttgtattaaagccacaagtttagctttctgggctgaagtccctttagggaggctgctggcctagatcacttgctttctgtccaccactgcactgttgtccccgccttccgcttacccttaacctcgaggctactgccatccgtgtaccagctcaaactctcaggccaaggctgatctgatccttcagatcatttcgagtatgagttccttctgccagaatgtcagcacaatgatgagtaggtgaagtctcaggcagtagtgagatcgaggatagcagggggagcgaaggtcactcgttcagtcaacaaaaagctctgacaatgtgtccatcggtcaggggaacagttggataatgttttcaagagcgttagtcagccatcggtcatgggggctgaaccacactttctaggacatgtgccaagttttgtctcagagtgaatttatctgcgtccttgaccagaagccactatgtgcagacaagcaggccatcctacagccaccaggtctaatttcttacaagtatgccacaggtctttttcagggttccaatctctgagtaagaacttcttttggcaatacctttgttctcagtcacatctaggagtctcatagctggggataacattagggcagtctcaagagcatccaaggccatctaagattgttctttatttttctatacgaagggctgtttatctctttaactcagcaaaacctggaatccacaatctgcaaaagcccgcagtgcccaggaactttttagcttgttttgcactggtcggtggaggagtatgaaacacagtctctttttttagctgtttcaacaggtaggccaccggactcttttaaggactcagcttctgtgttagcaccccttttgttatctcttaaacacattgatctttagccaaaaagctttcttttgttgccaggtactatctaagttttctagttttcctgacttttgtgaccagcattttatttctcttatctttttgtctcacagcacagctctgattctgactttggtctctgtctttgtcagcctcatgtttctttaactctttttcttgtctgactcttatttactggttcttcctctaaatatttctcattcagagtatctctctcattttagacctctctaatctctttcatctctattttcacttctcttcactgttaacctatctcttctgggtctgctgaagatttgcttttagctcacttttttgcagacctctatccttcctttgtttctcctcctctgcactttcttatctacttacactaactttcttaccaacttaccctgtccttctctttgcttttgtaacttcctgttaccttggtcagattgttgggactctttttagtcccacagagacgagacccccatcagagcctggcagttagactcacaggtgctccttaccttggacagaagccccaagtgggcggatgcctccctcactggagcttagaacagactcactgtcagcagctcagggaggggtcgcctgagaagagaaaacacgtggggcagggaagggagtgcagctctcacagctggctgtatcgggccactcatatctcaaagtgaaagcagtttttctgttaacaagagacgggatgcaagggacaggggaatgagaagctgcctgggaacctgcagcgctcttggccggctactcgaacagcctcctcttctttttttttttttttttcagcagccacagcatccaggccactgacttttcagggaccacccctcatttgctccggatttttgaactcattttccccctaggctccaggtccatggacgggaccactgtgacccgctggctgctctctggagttggagtgggaggcagggcagctgttgatctgaaaggaagtggtcagcatagggatctgacaggatttttaggcttatttcagaaggcataacttaaaaacagtcgtcagtcatcagtccaagtccgaacacaaagagacacaaaagacacacacagaaaccgtaaaccacaaacaaaaacaagatagtaacagacaacatagacgactcacaaaaacaaacgtaaacaaacaaaattaccaagcgacagaaccagagtcagagaaaggggagtggacacagattgtcccatttctagaaaaacagtagtcacaacaagagcggacacgagactaagacaaaaaagaaaccagaagaatcagatggcctctctaaggccggccgattgagaccctctgcacgaggtgggactcgaacccacgatcccgtgaccagacgcgaggtgggactcgaacccacgatctcgcaacaaaacacgaggtgggactcgaacccacgatctcgcaactgggcacgaggtgggactctaacccacgatctcacaaccccaaatggtctcttggccttcaaaggggtccaccaggcgtccctgatcctcccctgttcctcctgggacgtctcccagggcgaacggacggtggacacctggacacgtctatccttatccaccccgcactccctctcggagtgcggtctcactgagcatccgcaaaactgaaactgcgatcgcaccaaacttagaaacagaacacagacatcagaacacagacatcagaacacagacatcagaccaaagcagaacaaagaatcttacctctaagtgggtctaggacctctgggtggtcgcgctgtttcccggccaacgcaccaaatgaaagattctcgaattcccggccaatgcaccaaatgaaagattttcgaattcccggccaaatgaaagaccctcgaggggagaccctcactcagacactcaagtcccgggacagccgcgtacccaagaagacactgagaccatacataaaatgtagaaggcaagatttaataaagtagcaacatgaaagcacacagaccagagctctggggtcgaaataaagcagcaacatgaaagcacacagagctctggggtcgaaactcatacacctttgcacagggtagaggagtctcgacgacgactcaaatttttcacaagcttttaaaggaaaaaaccacaaactgggagggggaatggggagggaataggggaagtttaacaaccacaagtttactcaaccaaagagtcatatcctgtgattggcaatacatctggcctgttgaaacattctgtggttgttccagaaaatgtttttctcaagtatgttttccagatgggagggggtgggctccgaggtgaaagttcatgttctcacaagaggccagtaatttttcattcttcaagtcaagaacatttgctttattagtgttctaactacactgcgtatttgtctaaatcattttgtaaatttcaatattcaaaatttacatctctaaagcagcagctatgtggagttgtttgtgtggcaaaagctatagtgcgtatccaggtattattcagaatcatttccttcctacaataaaatgtagaaatcaaattaagttaaaaataagtaaataatacataaataaactatgaaaaattttattgagaaaaatgcacaatagtaagtcgctggagatgaaaaataaaagcaggctgaaactcacatcagctaaaacttagcttcagcttcccctcctacatcctgcctctgtctcttgaatctaacaacttcgcagtccctgggaatgattgtgtcatgagaaggtagcctaagggtgatgaggaaaccttcagagaagacagctagctgatcagcactctctatgaatcaaccatgcactgcaaacttttctactgtgtgcccttttattctggacatcaagtaagtccctgttttgagtgggttgcattccacttctagcatgttttcttatatctctgtcaatacactcacttccggacttatcttcagcttttaattccttcctccacaggctccatggactctggggttgtccagaatcctagacatctggtcaaaggaaaagaacagaaagccaaaatggattgcacccccataaacggacatagttacgtttattggtactacaagaaaccgggagaagaactcaaatttttggtttactttcagaatgaagacatcatcgacaaaatagatatgattggtaaaaacatttcagcaaaatgccctgctaagaaaccatgtaccatagagatccagtccagcaagctaacagattcagctgtgtacttctgtgctagcagtcaatccacagtggtgactactggcttttctcagaacacaaactctttatagactctgctcaggaaataagtggtacattagtttgttgaaagctaacataaacacaatgtgaaagtgtataagcaagaagcaagagagtgctgatcagctgccttctcagaagttttcctcatcacccttaggctatcttcttttcacagttgttagatctgagaggttaagtgaggagagagagagagagagagagagacagagagagagacagagagagacagagagacagagagacagagagacagagacaaagacacagagagagacagacagagacagagagaagaaagggaatgatggggagagggtaaagaggcccagtttcctgaatgtgctgagtataggcaagattaaccaaggtccattgatttgattctatctatctgtctctgtctgtctgtctatacaggtcatatacataggtagatgatagatagaagatagattataaatatagatattccccagcatttctttgttgaggcctttgatattaataacacctcagtatcgatgtgccatcttttactatgtaggtattgcacaagttttgttaattattttctaaatatattttagtttattgatacagaatctcattatttagcttattctggtttgaattctcagtcatcctgcctgaacttcctgagttctggggttcctaataggtcagctactatagtaggtcagctactgcatacaccgtctaaacttattttagcaaacttatgaattattttataatatccatcagaaacttatatattaaatcatttttatacaaaaatgttatcagattaaatcactatagtctttacatgtctcaactgatactccagcatattacataaaattcttccaagttatagagttaacaatgtgattaaaatatatttaatacatctatgaaacttttaaaataaaacccataaattcatgtaatggatgcacataaagaaatatcttctacaatgtcagtcatttcaagaaaacctaggtgaattctttatatcatcttttttcacatgaaacaactattagctgttctgttttaagatagacaatgctctttttaacctgtaaaaaaaaaaaaaaaacttgtaaaacttatacagtgtgctcactaagaagtatatttttttccaagcaaaacaataaacttccaagaataaagggaacccatatgggtaaacatatgatatggtgtggagaacttcggtgttgtatcttggctagtccagtctacacattgccatggccacattcatgatgcctgcagtcttataacacagatgtccacagtaaagagcctagacagtagttctcagaagcaatagtcttcccttacccactggttttgctgaaaacttaacattttctaaaaatagtttattaatttaatggtatgtaagcattcagatgaataactagcacaaagaggtagaggtatcagttggtaaatgtaaagcttataataatgaattaatctgatttcaattcttttgcagaaataatttgctaaataaatgtcttatgtacacagaatttagtggcataaccttcctcactatttacccctttgagttatctttaaagtattatacttcctaacagagaatacaacaaagatctgttcccagtagaactatctacatttctctcactaatgtgtacattaacatatcatatcactgaattgtgaggcagatttggaattatttgcacacattactgcaaagaattttaaaaggacaatgtctcattgtgtaatcctggctatcctagaactccctctgtaggcaaggctatccctaaaaaccacagagacccttctgcctctgcctcctgatgctagaattccaagcaaatagtttaaaaatatgcagtgtatatatctttcagtgattctgattaggatttttttcctgattataggatttcttagaacaaatttgaatcttgcatttctgagggtacctgccatcgtattacagtggtgcttcttgggaatcacatacatatgaggaggaggatggggatgataatgacacaggtaatgagatgtgtggctggcagcaaatataccgtgtagaagaagtgattatgcaaattttcttcactttcccaagacagggatacaattttaataaatgtttgttctattttaagtatcagtgtcaatataaaaaattgatagtgttatcctttgaaatcagtaggaattatacgggtgtacaaagggttttagaagctatgcaagctttctaacgttttccatgcatggcttcaagagtaaagcatattctttcctaaagcagaagtgtttaacctatgatctccaggcctcttggaactgcacagataaaatttaaagaatacacagatttaaatggaaaaatacatctatattttcattgtctaattaaaacacaccatttatttcacaataaaaatagtgaattaaaaagtaacagttttggttatatctgtaaccaacttgataatgtaaatcacattcattttcatttgcatatattgcatacattacagggatttgaaagtcaattttgtcatattgtattacatagcgtaaataccatttgtctttaccatggttttgaaatcatggtagttttctaattaatcagcatgtagtttattcatttgactttgaggttgtctatacattaatatcataataaaatgtaagtagtattttaatatcagcattagaaaagacagttttatctgtaatattatgaatttcattttatacctttagatatactcaagaggggtctttggggtttgtcagactgacaaaagtgaagaggcccttataagggacgaggcccccacctctgtggtgtgactgaaatgcaaaagccaagttgtagacacttaaagcagccacagatctcctcttagtacctacttctgttcttctttcgttctcccccctcccccacttccaacccctttccttttctttgttatcatggtttctctgacttcccctttactttcatcagtggtcacaaacaactacaaaacctttgtatttcaaccatgagattattataaaacattatacctgaagtgttacagacgacccaggatgaagtatacaataacatttgtttagcagatgagcagcatctttacgacatgattaatgtcctttccatttacctaagattttatacaataaatgtattcttgtggaaattataattcaaatccagtgatgagaaataattttcattagcaggtgaaattccatgtcaatacacatctgatgtctcttgacatggtattaaattattaatgtttttattagaatatcagatgctaaaattaatgatagcaaacatacacatagtgtttgatttgggctaagaactgctctaaattctctgttattctgagaaagatactcatcatggcatgttacagaagagaaaattaaatcaaagagaggtcaatattagcagggatgcttagctgaaaatggcagtactaggatttgagcctcccttacctcctagtcctgtgctctaaactatcgtgtaaagctttgtgacttctgtggttgggaagcttctaggagcagtctcatcacattcaccacattaattacttatggtaaagataggtaatggataaaaagagttatttgaaagaaacaatagatcatctgagctacctcttatgtgtggatttttttcatattagcaataaagtgggaatgaaaggaatcaacagagtctgaaacttacaggagtttaccttcccagctctaactatagccaatgcaccttcacccccaacacacacacaccattctgaatgtgactttggccacaaaatcatcccatttggttagcttgcttttcatttataatggatatacacagctttcagaagcagaaaagaagtgcaagagcctggaacttcaacccttgtcttaccatcagaaagaataaattgacgattgtcatgtgtcaatgatgatgaattctacacattttgctgtgtgggacacttgccttccaatttctgagagcctatgatggagctatagagatttttttttcactgaaactgagaattttatgatttgccttgtgatattttgtctctatgactaggtaaatctgagtttaacacacagaaaattcctttcccaggtttgccagatccctgttctacacctacttctctcaacagcatcaggctcacttctgagcacaatcctcagtccttgttcattttgcccacaggatcgatgaatagtacggtctttcagatcaatttctattcagtggaacttgacaggactaactctgcgttgacaactgaattggtatataatgctatgtactggtaccagcagggcctagagaaaggactgaaatggaattattgttcagcagttgaaaaggatgctcagagggaagatgtgtggataaagtgtctttctcaaagagaggagtgtctttccctcaccatgtagttgacctgccctagccaaatggcattggacctctgttctggtagtgtacctcagtagcacaggtcaatcccctttgtacatcaacttctccatgcctgctctcctcacatatcctcatttactttatttcttccactagctattatttcctactcgcctttctgaattctcatgaaacactcatgaaaacagttaaaccagatacacttttgttcttgaaaattttctctgtcatgctacttttcaaatactgagggctagctgaatagtaaacacattaatccacagagctaattatccaaagagtacataatcataagggaatttagcaggcctgaatgtattatggtagtaaatcagactctaattggacttgcttgggaggtcagggcacattccctaatttttttccagtggaacagaagatgctaaaaggaggccatatctgattaaactggtctcaagcgaatatgaatggtaagaggaaaaacttcttgagaatttttcgaagaaagcaacatgtggaaagcaattattaaagaggaatctagcacactatgttcaactggaccagtttgggaaagtaaactgattatttctttctaagttcagtttttgaccctgtggatatgaatgcatatcttcctattgggttcctccaatagagacaggctattaacacaactattttagattttctctctgtgacactggttctctacaaagaccacaatttacaatgaaatagaatcttatcaagaatagtgattctcttttgggataaaaggcgctcaatcaagtttataggacactgggtgaaaacctagactagaccaagaagtatcccaatgtgaaataaagattcagtgtagctggcatgtggttttcattcagcagaactcattttataaaagattaattttcttgatcctgagaacttttcaaaaatataaatatagacagcagaaaaaaaatccctgcaaatacaagctatagttttctgttgatttggggcaattaaaatgacctaagggctgggaataattatggtgtaaaataaaaggtcaaaggaagacaaacaaatgtttgatatatctaataaagtgagaaaagaaaaaactagagagtttccagagtcaggaacacacacacacacacacacacacacacacacacacacacacacacacacacacacgggggggggggcagtaaagctcaatgaaagcacaagaatcagtttccatagactgaccagacataatacttgaacttgaacttgaacttgaacttgaacttgaacttgaacttgaacttgggggtatggacatgctgagaggcatgagaagaggaagtgattagaaacacacctttcctaagtagttacttcatagaatgcaggtatacacatttcaggtttttaaaagttgaacatgttttaatcagaaaatctttagaaaagtgtatgtatttctcttctctgtagaaaagaagatgtaaaatgtatatgatcccaggggaaaaatgatcataatgtactggtttgaaatttttatatggagtgaaagaaaattcattgtttttatccatttaaaagtttttaaaatgaaaatgtgtatattgatatttactttttactactgcatactaattgtaaaaaaaaaaaaaaaacagggaatttcattaggacgttttgacctatgtagataaggtgctttgatcacttacccttattatttatacttcgcttctgattggttgtctttatatttcctattgtgtaagttgaccacattaaacatggttatgtggggtgtgaaagtattgacatataaaagaaaatatacaacatgttctaaatctttctgaatctggataatatcaattaacagggaacttctggatctataaaattttcttttaaacaacatgatttcactcttttttaaaatatatatatatatctgttttattacgtattttcctcaattacatttccaatgctatcccaaaagtccctcataccctccccccccactcccctacccacccattcccactttttggccctggcgttcccctgtactggggcatataaagtttgcttgtccaatgggcctctctttccagtgatggcctagtaggcatcttttgatacatgtgcagctatagtcaagagctccggggtactggttagttcatattgttgttgcacatacagggttgcagatctctttagctccttgggtactttctctagctccttcattgggggtcctgtgatccatccaatagctgactgtgagcatccacttatgtgtttgctaggccccggcctagtctcacaagagacagctataatgtctatattacactctattgcatatatgctacatttcttaatctattccctgatggaaatctgcatgaatttcataaatttgctattgtgtaacttggccacattaaacatggtggatgcaggatattccttcttcatgtaaactttgtttcctttgactatacaaccagtaggggtatagctggatcatgtggtaattttattcttactcttttgagcaacttttatattgaattccatagtggcagcactaggaattgaatccagtaaatatattttaaatgccagttttcttaaattaatttatctaatgtaatcaagtaatcaaaatatgaataggttttctttacaattttataagctaagcctttagattacatggagacataaagggttaccaacagccagggaactcttggaataaaagaagaacataggagggatgagtttgacaaagataacagtagtggaaattatggcaagcagcaatggtgacataaacagatcaatggaaaaatcttgtatatccatgaacaatagtgaaaatgcaggagatgaataatagaattttctacaaatgatagtgaaaaattgcacgtatgaatatacaaaaatgcaactggaccatcaatcacagcacagccatcatcaatccagttgtaaaataatgcacctagtgaaatcatgaagttcccttaaggcaaaatactcgtactgtttgaggctctcaagacaaggaagtatttagtatctccttcattattagagattgattaaaatggacatatcaaaattgagatagttctcaaagttaatcattaagagcacactaatagttatgtgctaaggtacaggtatatatctatatttcatccacaaaaaattagttatttctatcaatatttacatactcaagaaaggctagtgcagagaacttctaaaagtacttacaaattcatttccttagaaatcaataaaaaaatacatgtaaaaattaagcaaaatgcctaatgagtatcttacaagctaagaacttggataaactgtaaatatcactaaaatttacaattattcagaagaaatacaatcaagaatctgtatacaaacaggaatgactaagaacgagatacatataaaacatagtcagggctagacttcaataccaatttagaaagtgaaggaaccttcaattgaatgagaaaggaaaatttcatggaaatgcatacttcaggctgttatcttatttctatagattgaaaataggaatgagggagagtaaaataaagacaaaactgtcaacaacaacaacaaaaaaaagattgtataacctaaaacagtgattgaaaatgcaggcaagaaaaagcgaggttagcaaaaacaaacactagcaaatgaataagctgaaagacagtaaaaaaatagctacaggattaaacatttttgaagcagtgatcagtcataaagttatgaaacagcagtgataacagggaccagtaacacaaagttaattagatgacaaatagcctgaaacaatgtccatctgtgagatcgaaacctatgcataagttaatgagaaaggttccttaggagaaaatagagaaacactgaagataaattaaatggttcataagatgaaatatggtaacaaggaaggataataattagctaaaaggagtcataaaggagcaattaaagaccatttagtaaaacataatgtgaaatactatatatgcacatgtatgaaaataagcatgcttatacactcacatatattctaatggaaagaagacttagaaagaaaatttcagagattattactaaagcacaaacagtctggtcattgtctagtagccgtaagatgctttgtgcagtgccttttttgtttttagctatctaaaatacatatgtgttgtttttattaaaaaagaaagacagaaagaaaaccaaatttatttacttgttaaaattttccttccatactgtaaaatatgtcagcaacaacatgcatatatcatgatggccatgaatctgaaaagggatctatctagtcatagaaaaactgtagatgaggtctgatgtctccttttgctagtcaatgcaatcatgagcatgtggcttctctggtatgtagccctttatctcctagtagcaggtgagtctttgttctgggattcttgacaatagctccaagccttcttttgtttgtcaggatccttcttgggacacttgggctttttaatattttctgttttcttaacttctaggctctttggattgccaagttatccagactccatgacgtcttttcaaaggcaaaggacagaaagcaaaaatgagctgtatcccagaaaagggacattcttttgtttattggtaccaacagaagcagaaagaagagttaaagtttttttatttttttttcaacatcaagaagctcatgacagaacagacttgttcaagaagtgactcttagctaagtgtcccttaagctcaccctgcagcttggaaatcagttcctctgaggctggagactcagtgttatacctctgtgccagcagttgtccacagcattgaaatgtgtgttgtctttagcacacaaactctccatggagccaactcaagaagcaggtgatactctgggttggaaaaagtaagagaaattaactggagccagtgcaaaccacagcagatttcacaaaagattagaaggtacctagaagtggagcgacagcttgacaattctgaaagactttggagccagacctgggaagaatgaccttcctatggtgttttcctcctctttctgtgccttctgtgtttctgtttgtgtctactacttgtttttttttttttcaatgtggtactcatgatgaaaataagctggtcaccaaagagctcaaactcaatatcaccattttcccatgctgataaggatcaagatggctctttcaaagtctgaattttaaatgatctcaagagaatagatttgcgatgatctatcattcccttcccagggaacacctaacacaagccctctgtgtatgcgttttaagttatgtgttggtttttttttttttttaatggatgctacctagattttcactttgctcccaaggtcaaagtgagtgaaatactccatatttctgtgtgtcattcacacatgcactttttccagaaaagtatttcaagttttctgtaagcactaaagacttactgcatctcacagtctgttattgtcaatgtgtggtgtatgttcagagatgtgattatggagaaatgaagacatattactttccatatctgtaaattatgaaaggattctagagacttattttggatccattcttaatgtagaatttcaaagcctttctcccaaaccccatatctgcctatgatgtgtccaactgacctacggtgaccagttaaacagtgccatgtagagattctacattcttttctttggatactaccagttttaacataaagttgaagagggttattttagaaacacgaagtcaatacttcaatacaaaagggcaaggggaagaaagaagagaagaaaggttcagtggtagatagtgcctggggtccaagaaagcagaaagcaggaaggattcaagtgtgaggccagttatacaatataatgtaagttttataacatcttgatttaagatcttggatatatatatatatatatatatatatatatatatatatatagagagagagagagagagagagagagatagagagagagacagaaacagagacagacagagagacagacagagagacagacagagagacagagagagacagagagagacagagacagagagggagacagagagagagaatgacaatgacagagagaaagacagagacagaatgaggcaaagacagagagacaaaaagaagctaataaattaataatattagcactgtccaaaagtaataagagatattaatttggatattatatttatcttatgaattctcaaaatatagatgtgtagcttatattaatgaaacaatacaagatagttctgaaagagtgaaatatcattaggttttatttagtggcgcaatgaaagactatcctgtcaccacaaattgctttggtggtaccgaaacaataatgtaacaattgcatctgtaaagggatccattcacaggaaggttgcacatgaagcctttagtggcttcctatgattatttttctcttcttttgtccacctcttgcttttctctctcagcctactttccttctcattgatacagtttcatgcggagaataagacagtcactaaagataacatgttccaatagtctcattaaacattaacacagttccttatgagcttagttttgaaatctcgagacaaaaggaattttgaagatccaggcaagaccgtgtcatagacaaaccactgtagacacatacgtatctattttgacacagcataactggtcattttattaatgatacaaatctgatacttagatcgctatccttccttatctgaaatggattgaaacaccatgtgtgtatgcacaacgcctatctgttttttttttaatcatagctacatactattccctccatatccatttgttccaggagataaattaagtttttttctagcttactgacagaattgaaacacctggactgaacctgtcatgagcttttataatcttcaagagcaccgtgagaaacatgagggttgagacatggactattacatatatagctcgctttacacatcttaaaagttactctttatctccagaaacatatatcagagcacagcatttcttccatgtcctcatatctgttcctgacacaacccagtgaatagccagagctaatctagaagtgatagtaggtttagtagattccacattttttcactttctcagatctgttttatgattaaaatgcagatggataatttaagaataaataaaatcaagccagatgtggtggtgcactcctttaatcccagcactggggaggcagaagcaggcagatttctgagttcgaggccagcttggtctacaaagtgagttccaggacagccagggctataaagagaaaccctgtctcgaaaaacaaaaacaaaaacaaaaacaaaaacaaaaaagaataaataaaatcaacaactcaacaagaaagcagaagggccgagaaagaaatctatttcctgtatatagaggaggcagtacattgttgtggtggctcaggcttataattgatgggctacacagctgattttgacagaaagagaaggagagaatgagaaaactctaaaataccattataccataaagactatagttaatggattaaaggtataagaattacctgacagtagtatgagcctttaaatttggtattttctttactttatagctttttaaaatatagatgtattgttatgatagtaaagtaattggaaaattttttagatgaataaaactttaacaaattatatttagtagttacagaaaagctccttttttctttttttattgactattttatttatttacatttcaaatgttatctcatttcccgatttccgtcctatcccatcccccttcctgcttctatgagggtgtgcccccacccagtccggacttcctgccctcacagtcccctacgttggggcattgagcctttatggaaccaagggcctcttctcccattgatgcccaacaaggcgatcctctgctacatatatggcttgagccatgggtccctccatgtgtactccttggttggtggtttagacgctggaagctctggttggttgatattgttgttctttgtatggggttacaaatcccttcagctccttcagtcctttctctaatttctccattggggaccctgtgcttagtccaatggttagcttcgagcatctgcctctgtatatgtcaggctctggcagagaaaagctcttttaatactgtgaactgctttggtggtgacacaaagccataatgtaagaactgaatttaccaagggatgatgtcacaggaaggatactgataaaacaagaagacaccacatcctttgccgctccagtggggccatgggtgcacggctcatttgctatgtagcactttgcctcctgggggcaggtgagacctaagcttgcaagatagattcaaacacacccaaataattttccttgctggagtctctcctggccggtgtaaatatgctttattttttaattttcttccaggctcttttgatgctgcagttacacagaagccaagatatttgatcaaaatgaaaggccaggaagcagagatgaaatgtatccctgaaaaggggcacactgctgttttctggtatcaacaaaagcagagcaaagaattaaagttcctgatttactttcagaatcaacagcctcttgatcaaatagacatggtcaaggagagattctcagctgtgtgcccctccagctcactctgcagcctgggaatcagaacgtgcgaagcagaagactcagcactgtacttgtgctccagcagtcaatccacagcgctgaagtgtgcactccccctgcacacaaactcacccgggagccacttggggagcaggtgaggttggaaggaaggaagagaaattaatgagccagtgcaaaccacaacaaatttcacacaggagagagtttagaagagacacttctaaaacagcacacccagaccaagtcagctcttcatattgcttctctctcttctttattttattttttttctgttttttttctgacccttcttgctatgaattttctttcacgtggtcttcatggtaatcagatgattaccaatatcataaagttagttggtattattttgccaaactgttaagtttggttactttgaaacctatatcttaaggggaaataggtttgtaatgatttgaccatggttttcttggtgaacattcaagtctgcacacatctgtagtatcttaatcacatagtacaatactgctgcttgtaactcccgtgacctcaacttgagtgaagcacttcatgtttctgtgtgttcatctaatctgtcccttctaaatgaaagagtgtattcaaaatcgacttttgccagaaaggaaatacattgtccacagcttccttacaaaattgaaacccaggtacttatatacatagacaattacaataactttgcagtatttcatgccctgccatatgagagttgaaatatgaagcatatgttctgtgtgtgttttattttacatatgtacatattaccaaatgattattcataattaatgtgtgctccagtcccattgtgaaacacacaagcctttctcttgtattctcatctctcccactgacattatccagtgaccagaccaagccattttttgcactgccagtagcttgactatctcccacaatcccatgttgttctgtcccaaaacatcatcaattccatgatagagatacagacaaaaaataataaataaataaataatatcactaatttattaggggacaataacggaagagattttggccaatgatatgtgcagagatgaatgggagagaaagctgctgtggtggttccagcctatgacaacagtggggtggctgagaggaagaaccactaatatattaaggaaatagaagggagacttgttgggaagaaggttgattgggaagggaagaaaattagtggagacaatggcaagaatatgatcaaagtaatatgtgcatatataatgagtatgtatataacacaactgtaagagaataaaatacagaacatgtactgtaaacaccgtccagtggtagcacattttgatctgatattatcatttcatgacttcacaaaaactcaagtgcattggttatgttagtcaaatacacatacaactgtttttgaatgaatataagagtcaatgagctatctctaacaaaggtgaggaaaagctttctttctgatactaagaactttctcattctcactggtcacagaaagcagtaatatgatagtggagttggcaaaagatcacgtcacaggaagactgcagatgacaacatgaaaacactgcatcctctgctggcctagtgtgatcatgggtgcaagactgctctgctgtgtagcactttgtctgcttggggcaggtaagaactgagtcaaaagggaaaggacttgtcctcacactccacactacagttcccaatgtttttccctttcagagtccctcctgtcctgttctcattttctgtttccccctcttccaggctcttttgttgctggagtaacccagactccacgatacctggtcaaagagaaaggacagaaagcacacatgagttgtagtcctgaaaaagggcacactgccttttactggtatcaacagaaccagaaacaagaacttacatttttgattaactttcgaaatgaagaaattatggaacaaacagacttggtcaagaagagattctcagctaagtgttcctcgaactcacagtgcatcctggaaatcctatcctctgaagaagacgactcagcactgtagctctgtgccagcagtctgtacacagcgctgaaatgtacgttgccctctatgcataaaaccattgtggacacaattcaggaagcaggtgagaccagaaacgggaaggcggtcacagaaacttcctagatctggcaccaactgcagcagatttcacacaggactggaggttatttagaggcccatgagaaacaggccaggtctgagatagctattcttcataccactttcttatcctttttggcttgtctcttgtttgtctgtacctatccaccatcactcttccttcacactgtgctcatggctgaaagatgttagagatatacggatcataacttctgattgcatccttccataacactgatgttgattagcatcagtgtttgagattttgttttacaaaactagttaagtgtgtgtgtgtgtgtgtgtgtattgtgtgtgtgtgcgtgtacacatgtgcatatgcataaatgtgtgcatatctatgtgcagatggccatggagttcagaagaggggtatatcttttggagcttgagttgcagacacttgtgagtcactggattaagtactaggctctgaattcctgccatctcctagatccagatgcccttaactgctgaccacctttctagcctcctgattttatgcttaattcttttttttttggacatattttttaattaggtattttcttcatttacatttccaatgctattccaaaagtccccccataaccccccccactcccacttcttggccctggcgttcccctgtactgaggcatataaagtttgcaagaccgatgggcctctctttccaatgatggccgactaggccatcttctgatacatatgcagctagaaacatgagctgggggggggggcgggtactggttagttcatattgttgttccacctatagggttgcagaccccgttagctccttggatactttctctagctcctccattgggggccctgtgttccatccaatagctgactgtgagcttccacttctgtgtttgctaggccccggcaaagcctcacaagagacagctatatctggggatgacatagtaattgtcttcctgaagagaaccctactctagccacatttgtaaatgttgaaagtcatgcaaatgtcattttattatggatgcagttctggcactcagattctctcctgagcttgaagtgagcaaaaccatgtttctgtgagtcaagcagcttcttccttctaatgacctacggcacactgtatcccctttctctggaaaggaaaactgtttttgtccagtcttctaccagcattgtaaacactcatatggagaattccatgcagttgtcatgtgccttttaaatcacattatggtattattttcccagaataatgattatagacacatggagcatgtcttagggttttactgctgtgaacagataccatgaccaaagcaactcttataaggaccacatttaattggggctggcttacagcttcagatgttcagtctgttatcatcaaggcaggaacatggcagcatccaggcaggcatggtccagaagaagctgatacatcttcatctgaaggctgctagaagaatactggcttctaggcagctaggatgagggtcttaaagcccacacccacactgacacacctactccaacagggccacaacttctaatagtgccactcactgggccgagcatatacaaactataacagagggctattttattttattttatttgttgacatagcatcaaagaatgtttgaaaatcactatatactgtacagtctaactttaacatacacaagagacttccattatcctcatatcaactcaggaaattctctagttatttagtcaaggaagttttacaatgtctatacattaagaaataccagccttttgccatttcttaagacatcactggtttttaatcataaaatgaagatgatagcttaagatacaataagtaaagtttttaatagaaaaaaatacacaaataaaagaaaatcctgaagtgtggtattcagtgcctataattcctcagtgagaatggggatgactgaggatcacaatttagaatctaggatgccatatattgcagaactaagagagagagagagggagagggagagggagagggagagggagagggagagggagagggagagggagagggagagggagagggagagagagagagagagagagagagagagagagtatcaccaatgattacattgttagtagtatgctgtttttattatgatagttattgtttaaatagaatatgtgttattgtacattttgatgtacaatacaatgcaggtaacatactttctttttaaaatttattttattttattatttaaatattttctttatttacatttcaaatgctatcccaaaagttcactataccctcccccctgccctgctcccctacccacctactcccacttcttggccctggcattcccctgtactggggcatataaagtttgcaagacttcggggcctctctttccaatgatggccaattgggccatcttctgccacatttgcagctagagacatgagctttgggggtactggttagtttatattgttgtcccacctatagggttgcagacccctgtagctccttgggtactttctctagctcctccattgggggccctgtgttccatcctatagatgactatgagcatccacttctatatttgccagggactggcatagcctcatacgagacagctatatcagggtcccttcagcaaaatcttgctggcatatgcaatagtgtctgggtttggtggctgattatgggatggatcccctggtgagatagtctctggatagtccatctttcatcttagctccaaactttgtctctgtaatgtctttcatgggtattttgttccccctattctaaggaggaatgaagtatccacctgttggtattccttcttcttgattttcttgtgttttgcacattgtattttgggtattctaagtttctgggctaatttccacttataattaatactttcaaagtttaagatatgcagccaaatttgctaacttactataaatgatcagcgacatcacaattatgagtctgaagtgatcacttcgcaggaaaacttgatacaaagtgtgagaacctcatccttttcctagttctaagccatcctagcttcaaggctcttctactgcatagctttctgtttactggagcagatgagtcctcagggaaaaagaacaattcttgcccagagattgctagttatacatccttgttttactttgttgatgccccttttggtatgcattccgtcttctgtttcttttccattttcttttgatgacagagttatccagactcacattcagactcatctggcaaagaggaaaggacaaagagcaaagatgagctgatagtcctatgtggcatattactggtttttggtatcacaggaacagaagaaagagtttagggttcttttgtatttacagaatcaagaagctattcaacaaataggttcagaagtgatccagagcagaatgtttcccaatctcatccttcatcttggaaatgcagtcctcagaagcaggagattctacattgcacttctgtgccagcagctctgaaatatgaactctactttgtgcacaatccctatatgtagtcagttcaggaagaaggtgatgctcttggttagaaggaagtaacagagttaacaagagttaatgtaagctgcaaagaactttgtttctcacaaggcttcatggtatctaaaaatcatggaatgatatcctgaaaattctattataactcttccctcttaaggtgagtctagattaaggcagtgatttttttatatcacctttcccaacctttctttacattccttattgtttgatttttctacctataaactttcttctttaattcagtacttatggagatgatgagctgatagtcctaatagttcatcaagatcacaaataaaacaaacattactctaccctgttgataaatatcaggttgccaacaaaagagatgtgcagatcaattaatagaatggagcattaaaaaaaatctcatccatttatagtcttctaatgtttgaaggagacataagaattatgcacagaaaaggaaatatgccttttaataaatagtgcatgtagaactgaatgccacatatagaatactagaataaggtgcacatatcttcttctgcacaaaaatctattcaaaatgaatcaaagatttcaattatttaagacctggaactcttaaaaaatcgggagaaaagaaatagagttaaaatacctaaagatataaatatagggaaggtctttcagaaaagaattcaaacagtgtaagaaataattctgtggatgtcatgaaatttgaaatcttcacacagtaaagaaaataatctctaaagagatgacctgcataatggaataaagtcctctcgctgtgtatctgaaaggaaatttttatctataatatatgaaaagttgcagaagttaaacattgcctcacataaatcatctagtcaatacaatacatgaatacatatattaaatagaattctcaaactatagaaacaggtgctaatgtaaattgaaaaggtgttcaatacacatagtcttcaggaaagtacaaacaaaatccacattgaaatatgttcatagtggctatgaccaagaggatagacagcaagagataactgctgataagattgtggaagttgaatcctttcatgttgttgaggggaatgtaaactgttatagctagagaaaaacaggtatggagagatccaaaaattaaaaatgaatgtatcatgatccatttatgctttatgctatgtgggtaaatccattggatttatactagtatactacagagatatttgtgcacctttattttttttttactatactgttcacaaaggcagcatatagaaaacagctagcactccatcaacagatgaaggaaaagacccgtatactgcatatatgcggtagaattatgttcagttgtaaataagaatgaaaagtatttaaaactagaaatcattatgggaaaatactatcagaaagaaaatatgaaatatgtttttacttatacacagaaaaatattctctcacatgtagaattgccatgaaagcagtcaaaagaatatgagatgacaggaaagggcagtggaaagcatgagaatgttatgggatatgtacaacaagaaagtaagaggaagtgttggtaggaggaaggggtgagaatatggaggacaagaaacgggacaggggagtttcaaataagaacaacatttaatgttgcacatacatgtaagggaaaagtgtcattctgaaacatgtttttgtatactaattttattttaattaaaaagtaagcttggccttttctaagtctggctgaaaacctcaagatcacaaatgccttatcataatttagctataattttctctgtgaggcaccttgtgtacataaaataactcagatgttcctctactctgaatgaatttctgtctcttacactttacccctgagctcaaggaagtgaaatacctcatgtttgtttgcttaccttgtctagtcctcataaatgatgcatagtacttcctccatatctatatatccagtaaagaaaccaatttttactcaagtcccctaccagcattgaacaacacttgaaatattataatttattcatagcattgtataaacagaaacgtgatggttgagacatagatgtttacatgcttgcttccttatacataactccatattaacagaatagtacacaaaaataccctttatctccagttacacataaagatgcacaggcctttctcttatgtcttcattcactaactggattgagccagtctagctgtgacagtaaattcagtctaccccataatgtcttactatgtcctaaaacatcaccagtcttatgatatggaagcgaatagtttaagaaataaaaaaggtaataatgtaattaaaatgagaatggggagagagttaaagatatattaatatataaagagagatgtacatgatgtgtttgtgtgtgtgtgtgtaagagagattgtgagggaagagacagagagggagggagggggagggagagagcgaagagagagagagagagagagagagagagagagagagagagagagagagagagagagagagagcgccattgcaggaaggggactcttgggaagaggaaagggttttgtaagggagaaaagaaggcaataggtgccaatgggagaaaatatgaccataactcattgttcatatatagctgaacaggcaaggaacataagaaaatgaaattaagcttctgaggcccaatcctatgctgaggagctactggtaaattatgcctgccagggcagggagatcccctttcctttggtaggtcacaattagtaggatgcccataccctactgaatgaccttatgtgtatggattacactaactgaactcaatgggttaaaactaactaactaactaactaactaactaactaactaattaaattaagaggaatacatgctgacatgttctggaaggatgttggggaaaaaaaaggaaggaatgagggtggacacagtgaagacacattgtccacaagcacaaaattttcaaagtgtaaatttaaaatattattaaaaaagaaaatactaatgtattacctagcaataatacaatatgttaactctactatttgttgattttaggacttcttgaaatataactgtactgtttatgatagaaaaatagttataaaatactttttgtggataaaatagaatttgtgatctttagctaccagcttatttctgctctgaatactgtatgaaaagagaaagatgctgagcatggagagaataccacattgcagacaaaggaaggaaaaaatgtggtacagatatcaatcttcccacactgggctgtggctatattaaagctgccatcccttgactgctgaacacactctggacagaggagagcaggctgtagctcacactgactccagttaacaactgttcttcacttccaactcatatggtacctgcttcctggtttgagtctgggactggtttgtgcactaaagaaaacgcacatttccctgctgtagacagactgtttgcacagaggttcactgtcctgttaaagatcagcctgagtctttctttgagtcttggattttaaatctcaaggggcaggatcaatttgtgatgagctctctgtggacttctggggagtttccagctctggtcacatttatatatgtttaaagtcacataaaggttattttgttatggatacaactttgcaccttggattctccaagataaatgaagcatcctgtgtttctacatacacattgctctatattggtatctggttttccatatccatttcctctagaaatgaaaaaaatctttcaatctcttgccaacaatcaaagtatttgtaccaaaaattttatacagttgaccatatacttttataatcactctatattatcagatacccagaattgtgactattgaggcatggtatgctatgcatattttttgtcttatgtatttctccatttattactaggtatataatcaaaatgtataggctattggcaatgtggagtgccaagatgcttattatatgaggatctgaaattgaaatccagaatccacattaaaaaaaaaaagcctgaaacaggatatatacttttaatcactatgctggtgaggtaaggacagttatattcctacaacatgctagtcagctttcttagaagaatctttgagctcctggtaaaagtcagagtctttgtctctctccaacatcccttctcaaagataacaaaacaaacaaacaaacaaaacaaaaggtgtaggaaagataatgattgctactgtatgaagatcttctttttccattcctggacctatgtagtggaaagggaaaactgactcttggaaattgtcctttgactttctcatatatataagtcccaacccccacacaaaataaaaaaataaatgcaagtaatgtaaaatcttttttataaatagatgcaggattgaggaagttatttggtgttgacctctgcccgcacatgcatgcatactcaatgcatactcaatgcacacatacacatgaatacatacatacatacatagatacacacacacacaccgttactgagcacagcaggcttcctcctttatcctttgtaacgtctcttcaccttatcctgcaatgtagatcaagacagtctaagaaaggctatattaagaggtactaatatcttgttttctcctagtcactggtttttatcataaaacacagataataacataaatatccagtataataaaatatttaataagacaattgtcttgtaaggatagagatgctgaggggaatgagaagagcctggctgctgtgcataatcctgaaatttccaacaactgggatatggaggactaaggatgagaacaatgaatttggtttggattttggtattttattgtgctatcattataaacacatttataaatatgggatactgtttaacttattggaaagagttacaaaacatttttggaaatcctgggtattgaacttaggcctcatacattgaaggcaagcactttaccactgaactacatacagccttatccttatgaagtaaatttaaatatatgaaatatcacccggtctgttttcagtcttagggtacaggattttctactgtttcagggactacattggaaagtaacatgaattagcaatacaacagctatgaatctgtaggtgtcacgtcagtgtcacgccccaggaagtgtaatgaggaagattgagaacacttcaaccttttcgtacttctaagccaccatggctacaaggctcctctgttacacagtactttgtctcctgggtgcaagtaagtcctaaggacaaaaagacagtctttgacctggagattgccaacccatatctaagtatttttccttgtcaaggccccttcttgtctgtatttacatcttttgttttcttctcttctaggaattttgaattcaaaagtcattcagactccaagatatctggtgaaagggcaaggacaaaaagcaaagatgaggtgtatccctgaaaagggacatccagttgtattctggtatcaacaaaataagaacaatgagtttaaatttttgattaactttcagaatcaagaagttcttcagcaaatagacatgactgaaaaacgattctctgctgagtgtccttcaaactcaccttgcagcctagaaattcagtcctctgaggcaggagactcagcactgtacctctgtgccagcagtctgtccacagcattgaaatgtgcattctctccagtgcataaacccaccatggacttgtctaaggaagcaggtgatgctctgggttgaaaggaagtagcagaaactaactgaaacctgtatcaaccacagcagatttcatgctaggctagtgagcattttacagttgaggagtgatattctgatatagctccctctgggtcaggtcgaggtgagtggcttatgagctctaattttttctttctttgtctgctttatatttttctcattttgcacacttcctttctcctcttgtattcatggcaaaaataatactgacatcaaacatcacatttccagttagctccatattaccacactgataatgataaaagtacaaggaaaaacagactagtcttgtataatagaataaagtcacagttatagccacttaatcttttacaaaggtttcaaaatatacttttgagaaaagacagcctactcaagaagtgatattgggagaagtaaccaactgctttctgatcaaagttaaaggctgctgctcatcaaagtaaaacccatgctagttactgaatatctggcccactatcgtagtagactctaacatagaacctacttctattttaattaatgagcatagtgtcaaactgcccttaatataatgatctctacacgcatagattagtgcagttctcaactctcatgtcttcatgtaattgacatagttaatacagactcacaactggccagtatgtccagattaagtgtctgtgtagtgctcagccataaatgggtcatttataatatgtgtatttcgagctaagactcaggagaaagatttttaagaagagtatggagaggactggggagaaatagtgtcttctgggcttgactgggtcattctgctcatgacatcatggcagctttgattacctgtacaagacctgcccaaaatcatgccagtcaacatttcaacacaaatcgaggagatgctcgtgaactttactgaattgctacttctagttgatggctcctgggcagggctaggatgagaaagctggttttctttaggtgtgtggacccaggttgagtgaccatggctccacatgcatgagtaggtgagcaacacttattaactcaatagcttagagaccactataaaaaaaaaaaagaactaaaaataggtaggataggaacctgggagactgaaatggtgggaagtaggaggagtgatggggaggtaaatataatcaaactacctgtgtgtatgaataaataaatatatttttaaaattatttttttatgctccgtattttctggctgttccacatcccataccttcccccgacccccgtctccacatggatgtctcatttcttaatgattttggaaaaattggataactacaatatccaaacctctcactctgtcacatgatatgaactcactgataaatggatgttagcccaacaacttagaatatccaagataaaatttgcaaaatacatgaaactcaagaaggaagatcaaagtgtggatacttcaatccttggaatggggaacaagatacctgtggaaggagtaacagagacaaagttctgagttgagatggaaggaagtaccatccagagactgccccaactggggatccatcccatatacaaccaccaaaaccagacactattgcatatgtcagaaagattttgctgacaggaccctgatatagctctcccttgtgaggctatgccagtgcctgacaaatacagaagtggatgctcagagtcatctattggatggaacacagggcccctaatgaaggagctagagaaagtactcaaggagctaaaggagtctgcaacactataggaggaataacaatatgaactaactagtatccccccagagctgtgtctctagttgcatatgtagcagaggctggcctagtcagccatctgactgggtgagaggcccttggtcatgcaaagattatataccccagtacaggacaatgccaggactggaagcaggagtgggtgggttggggagcagggtggggggagggtataggggcctttggggatataatttgaaatgtaaatgaagaaaatatctaataaaaagaaaaaaatcagtgactttcatagaagaccttagactagaaagttcaggttacatatatatatatatatatatatatatatatatacatatatgtgtgtatgcatatatatatatggtaaaattaagattttaaatcactgttccatagacttgaacatccatgtttatactttcattattcactataaccaagatatagaatcagtgtaaatatctatccagagatgaatagagcattaaaatatgccacatagataccattaagcattatttatttccagagaagaatgaaattatggcatttaaataaatctgggttaaaccatacactgatatgtagagtgaaataatcctgaatggtaaagacaaatattatatcttctctcatatatataatcttaatttaagtttatatatacttgagcatgcacacacaaacacatgtatgcgtgtgtatttaaaattatagagctattcatgagggaaagaaaaagctctcaagtggggagagaataagagggagtaatagatctatgtgacatgatagcagatggagagactatttagagggaggacgtgggtacagccagtgaggcatatatgaacaaagcatattgatatcttacagaaaatgagaatgtcagtctttaagaggggttatgtggtaaagtcactttccaccctaactttcctgataaccttagtttgatctccaggatctatagaatggaagaagagaaacatttttttaaaaaaactcccagagtttttgtttgtttggttggttttattgttgtcattattgagtttttttgttttttgtttttgtttttgtggttcctggatggaaacaattcatttggtgtttacctggatctttctaaagaaacttgagatcatgaatcatgcttaatcaaaagtataagtcactgggctccataatttggtatatattttaacatattaaatagatattaaacttggaggagaatattagtgttcccttcttgctctttcaacactgtttacctacagagttaaaccttgtttctttttattgtgaagggctgtggtatttactttatacttataattaatctttttgtctgctgatatttttttggtaataactatttcaccttgcatggaatttgtgaagatttgtaccttagctagcatagagtactttgagatttttattgttattatttttaaattgtttgtattgcttaaagttgcttgcttttatatctccctctcttctctatttcttctttctttcatttttctttctattgatgtctcttctgtctgtgtctcctctctctcccactttccttgttctcttttaattctctttttctcttcctttttctctttttactgttttctctctccccctctctcctttctccctcctatctctctattttctgtttcactctccatatgtatcactagtgttataatcacaatgtaaataatagtctaattagagaaaactccaagcttgtaagaattgatttggagtatgaaaatgggagaaaatttatctatctacatctgcattactctcattacctagtttttagtacttaatcttatgatgatgcttcctctagatttctgttctcaaatggttcacttatatcattagactgtttcttattaagggttctgtatttttaacaatttttgtaggaatttctgatatgtactagataatcagtcttctgtctgtctgtctctctctctctctctctctctctgtctctatgtatgtgtttgtttgtatcatctagaacaattggtttagaaacagaattttccatatcaaagagattcctgcattcaaattgacattgtttctggccacaacacttcagaaagacagcagttttcactcactgctgtttgggttccattagattcagagcacaattctagtgaccacatgtgatatgaaaaaaaaaaaggtatgtggaaattgttacaatatagtagaatatttttctgttcctcaaactggcacaatctggggattacaatcagatatatgactatgtttcagtaacctagctacccacctcatggattcaaacatctcacatgtttcagatgttgatgtaaatatctttagttgtgttctcttagtttgccactccaaacagtgagggtagactatggacatggagattggcataatctgagacctaaaatgctgtgaaggtatagggaaaacatcaacaaaacaaaaaacaaaaaacaaaaaacaaaaaacaaaaaacaaaaaacacctgctcttgaggaactgtgaatacagaacacaactaaaaatgacagaaataaacagtatttttcttcatccatatgaagcctcttctaaatcctggaaacagaccattgaggtttgagatgacctacaaactgaccatatcaaaaatcacttttataggatttgaaaacccaatgatcttataagagaaaacatggacacaaaaatgaaattcagtacctaaatttctttgacgaactaataaagatggaacagaaaggggaaataggtcaggtttttgaagattaactcttccctgaggagacgatacaatctggctgaggtatataaggttcttcatatttttcaagatgccacttgtgaatagatccatcagcaagacctgctgagatcatgctgtacagagtccaaggcatccaggcaaaaatagcctctacagtctatcacatctcagcttttatatttcaagagaatatgtctagttcaaaactcgaataatgttgacactaagaaaagtattaactatggtaaaatgggaaactataaccatacataggaaccaaaaataatcaatagaaaaaatcatgaaatagcacagaacttggaagtttcattccactatgatccaaagaagttagagggtgatgttctcataatctgattaaccaataacatttgttgaccctagaaatgaagacaagggagcaaagatgcaagctaccatgccacacagacaagatggaatttctttatagctaaaacagacattaaaacaataatagaatttcataaacaagcatatgccaattaattctacatagatgaaagcattattggagaagcagaacttaaaaacaaatgttggaatttgtgaagaactgcatgtataagaaattgaattatttaacaaaagtattttttaaagaaaactacaaacccatattccattccataaaccccatcacagcataaaaccaaataaaaccaagcaagttaaaaaaatacagatttgggaggggctgggaagacctctcctctggctgagaagctctaggcagtgatggtggctgggaaacagagtaattttacttcagggatttctcattaggaggtttcccatgaggaagttaatgatcctccaatcatacagtattgaacacaatgagatgtgaagggaaaagaaagggagagaggatgttggggagaggaaaggtctattggagctcagaggagtagaagggagggaagcatggaggaattaggggaaggactgaaggagctcaatgggtttgcaaccccatagaaagaacaacaatatcaaccaaccagagtctccagaactcccaggaactaaaccacaaaccacagagtacacacggagggaccaatggctctagctacatatgtagcagagaattgccttatctggcatcagtgggaagggaggcccttggtcctgtgaaggcttgatgccccagcataggggaatgctagggtggtgaggtgggagtgggtgggtgggaatgggaacactctcatagaagcagggggagaaggagtgggatgggggatagagagtttgcggagggggaaccaggaaggttggtaacatttgaaatgtaaataaataaaataaccagtaaatttttaaaagaaaacaaaaggattgtgatgtgttgtattctctaagtttgccactctaaactgctagagtaggctattgccacagaaactattttcagtaaaaataaaatataaaaataaaaataagataacatgatattgatagaaagacacattagaaaagtactggggaagttgaagagagatatagaaagtagatatcatcataaggtattatatatatatatgtataaattcatcaaaaataaatactttttattttcaataatagcaatttataccaacttcacataaatttcttcaaagccaggagaaaaacacttcagacaacattacttaaagacaataaaatctaatgacaaaatgtggcaaaagtattttagaatgacacttatgaccacaaaattcttcacatttagaagtcaaaatcagctatgttaatgtgtgttgtacacacacagatgaacatatagaggaaatagaatgtgatcaacacttcagtgaaaacactgttttagaagtcataaaaatgtatctaccatatcaactgatggtcaggccattttaaaattcagaggaaatatatttttaaatctggtattcatttaaaacaaatgttctaagaaaagtagtaacaaatataaactttcccaaaatgacagaagttatagacaaaaaatttatgagtaacatgctttcaatagttatagaaatgtttttatataatatggaataggttactatattttctgtctactcttgatcaaatcttaactaaaatgaattacaaggcaacaaatatgatattaaaataaaacaaaaccccaatattttgcagaatacaaaattctttaagtgaaaaaggcccaaagaatcaataaacaagtagaaacattagtaaatttagtaagatcatagggtatagatcaatataaatatcaaatgttgaatttactgtttcaaagactatgaaagtgaattccagaaaataataatgtgtctttaacatgtccgggatcacaggtgaggaggccacaacatctgcctcaacacccatagtaactgtgtcccctcaggatgttgcacagcttatggtctgagcctgtgccctgagtagaccttagtagaccacaacacccagaggaagctcgactcccagatgttctaacatgcctaggatcacagttgaggaggcaacacctatagtaactggatcccccaggatccaggggtgcaggaacccctgactagccagtggcacaggttccttccagtctgaacttgcacctggagcagacctggggtgctggtactgtatccactcttaaaacacccagagggagtccaattccctggtgccctgaaacacccaggatcacaggatctcaggatcacagagcaagctcaactcccaggagatcagtcacatctaggagcactggagctatgacacactcaagatcacagctgaggccacaacatctgggacccccataggaaccagtgatacataaacccccacccagccagaaacacgactttcttctagcttgcacctgtgcccagggcaaacccagggctctggctccccacccacctctgcaacacccagagaaagcttgactcccaggagctctgacacaacaggatctcaggagcttggtcatactagaatttcaggatcccagaggcagcttgagtcccaggagctctgacacacctagaatctcagaattgcaggatcccagaatcagagaatcacaggatcaaatagaaagctggactctgaagagttctgacaaaaccaggatcacaggagggacaagctccagttagagatagcaagggcaagtagcactagagataaccagatggcaagaggcaagactataagcaacagaaaccaaggctatttatcatcattagaacccagttttcccactacagcaaattctggataccccatcactgtgtaaaagcaaaatttggatttaaaatcacatctcctgatgatgatgataaaggaatttaagaaaaaacaaaaataaatcccataaagaaatacaggagaacacaggtaaacaggtagaaacctttaaaggggaaacacaaaaatcctttaaagaattatagaaaaacacaagcaaaagaaagataaaggaattgaacaaaaccatctaggatctaaaaatgaaaatagaaacaataaagaaatcacaaagggagacaactctggagattaaaaacctaagaaagagatcaggagtcatagtcaccaacagaatacaagagataaagacagaatctcaggtgcagaagataccataaaaaacattgacacaacagtcaaagaaaattcaaaatgcaaaatgctcctatcccaaaacatccaggaaatacaggacacagtgagaagacaaaacctaaggatatagaagagagcaaataataaggtatagaagagagcaaagattcccaacttaaaaagcgagtaaatatcttcaacaaaaagatagaagaaaacttccctaacataaaaaaagagatgcccacgaacatgcaaaaagcctacagaattccaaataaactgagcctgaaaagaaattccttctgtcacatagtaatcaaaacaccaaatgcacaaaacaaagaaagaatattaaaaagcagtaaggggaaaaggtcaagtaacatatgaagtcaaacctatcagaattccaccagacttcttgccagagacattaaaagccagaagatcctgggcagatatcatacagaccctaagagaacacaaatgccagcccaggctactacactcagcaaaactctcaattaccatagatggagaaaccaagatattccatgacaaaaacaaatttacatagcattttcccacaacttcagccatataaaggataatagatggaaaataacaacacagggagggaaactacaccctagaaaaagcacttttgggtttctttcaacaaacccaaaagaagatatccatgcaaacataattccaccactacaacaaaaataacaggaagaaacaatcacttttctttaatatctcttaacatcaacggactcatttccccaataaagatatagactaacagacttgatacataaataggatccaccattttgctgcatgcaggaaattcacctcagtgacaaagatagacactatctcagagtaaaaggctggaaaacaattttccaagcaaatgggactataaacaaatctgtagtagtcattctaatattgaataatattgacattcaacctaaagttatcaaaaaagataaggaaggacatttcatacctgtccaaaaaaaaaaaaatcttccaagatgaactatcagttctgaatatctatgcttcaaatgcaagggcactgacagtcataaacaaaactttactaaagctgaaagcacatattgcacttcacacaataataatgggaaacttcaacaccccagtctcagcaatggacagatcatggaaacagaaagtaaacagagatgcagtgtaactaacagaagttacggaccaaacagatttaacagatttaacaaaacattttatcctaaaacaaaggaatataccttcttctcagcactcatggtaccttctccaaaattgaccatataattggtcacaaaacaagtcttgtatcaagagatacaagaagattgaaataatctcattcatcctatgatatcaccacagattaagctagtcttccataacaagaaaaacaatggaaaacccacaaacacatggaagctgaacaatgctccactcaatggtaacttggtcaaggaagaaataaagaaagaaattaaagtctttttagaatttcaagaaaaggaaggcacatcacaccaaaacttatggcacacaatgaaaacaatgctaagaagaaaactcaactctgagtccctccaaaaagaatctggagagagtatatattaacagcttgacaacacatctgaaagctctagaacaaaaggaagtaaatacacccaagaggagtagacagcaggaaataatcaaagtcagggctgaaatcaacctagtagaaacaaaaatagctataaaaaggagcaaccaggggcctagtgagatggctcagtagttaagagctctaactgctcttccaaaggtcccaagttcaaatcccagcaaccacatggtggctcacaaccatccataacgaaatctgatgccctcttttggagtgtctgaagtgtacttacatataataaataaataaatctaaaaaaaaaaaaaaaaaaaaaggagcaaccaaaccaggagttgtttctttgagaaaatcaacaatatagataaaccgttagccagactaaccagaggtcacagcaacagtatccaaaatatcaaaaatgaaaggggagacataacaacagaaactgaagaaattaaaaaaaatcatcataccctactacaaaagcctatactcaacaaaactggaaaatctggatgaagtggacaattttttagacagataccaggtaccaaagttaaattaggatcagataaaccatctaaacagtcccataatcccttaaggaatagcatcagtcattaatagtctcccaaccaaaaaaaaaaaaaaaaaaaaagcccaggatcagatggatttagtgcagaattctatcagacctttaaagaagacctaataccaatactctttaaactattccccaaaatagaaacggaagggatactactcaattcattctatgaagccacaattatacttatacttaaaccacacaaacacccaacaaagaaagagaacttcaggacaatctctcttatgaatattgatgcaaaaatactaaacaaaattctcgcaaaccaagtataagaactcatcaaaatgatcattcaccatgataaagtaggcttcatgccagggatacagggatggttcaatatgtggaaacctatcaatgtaatccactatataaacaaacccaacaacaacaaaaaaacccacatgatcatctcattagatattgaaaaagcatttgataaaattcaacatcccttcatgggaaaagttttggaaagatcaggaattcaagacccatatctaaacatagtaaaagcaatatgcagcaaagcagcagacaaaatcaaagtaaatatggagaaacttgaagcaatgccactaaaatcaggaactagacaagcctgcccacactctccctacctattcaatatagtacttgaagttctagccagagcaattcgacaacaaaaggagatcaaagggatacaatctggaaaggaagaagtcacaatatcactatttgccaataatataatagtatatatacgtgaccccaaaaattctacagagaattcataaacctgataaacaacttcagcaaagtggggcatataaaattaactcaaccaaatcagtaaccttcctctactcaaagtacgaataggctgagaaaaaaatttaaggaaatgacatccatcaatgtaggcgtaaataatacaatgtaccttggtgttactctaacccagaagttgaaagatcttcatgataagcacttcaagtctccgaagaaagaaattgaagaagatctcagaagatggaaatatctccatgttcacggattggcaggattaatatagtcaaaatggctgtcttgccgaaagcaatctacagattcaatgcaatctccatcaaaattccaattcaatttctcatagagttaaaaagagcaatttgcaaattcatttggaattaaaaaaaaacaggatatggaaaactattctcaacaataaaagaacttctggtgaaatcaccattcctaagctcaagccatataacagatcagtagtcataaacagtgtatgatattggtaaatagacaggcaggtagatcgatggaatagaattcaagacccagaaatgaacctgtatacctatgatctcttgatctttgacaagaaactaaaaacgcccagtggaaaaaagacaccactttcaacaaatgatggtggttcaactgcttgtcagcatggtagaagaatgcaaattgatccattcctatctccttttacaaagctcctgttgaactacttcccttgaagtagttcaagtaccttcacataaaaccagatatactgaaactaacagaagagaaagtgggaaaaatactccaacacaagggcacaggtgaaaatttcttgaacagaacaccaatggcttgtgctctaagatcaagaattgacaaatgggatcttataaaattgaaaatcttctgtaaggcaaaggacactgtcaacaggattaaacataaatgaacagattgggaaaaaatatttaccagtcctatatccaatcagtctggtggttccttagaaaattggacatagtattatacaagaacacagctataccactcaggcatatacccaaaagttgctccaacatataacaaggaaacgtgctccactatgttcatagcagcctatatataatagccagaagctggaaaaacccaaatgttcttcaacagaggaatggatacagaaattgtggtacatttacagagtggaacactaagctattaaaaacaatgactatatgaaattattaggcaaatggatagaattagaaaataacaacctgagtgaggtaacccaatcacaaaagaacacacatggtatgcactctgacaagtggatattagcccaaaagctcagaatacccaagataaaattcacagaccacaggaagctcaagaagaaggaagaccaaagtgtgggtgcttaggttcttcttagaaggggatacaaaatactcacaggaggaaatacagatacaaagtgtggagcagatacttaaggaaaggccatccagagactgtcccacctggtgattcatccaatatacagtctccaaacaaggcggctattttggatgcttggaagtgcttgctagcaggagcctgatattgctgtcttctgagaggctctgccaaagcctgacaaatacaaagtcatatgctctcagccaatctttggactgagcacaggatcctcaatggaggaattagaaaaaggaatgtagaagctgaaagggtttgcaatctataggaagaacaacaatatcaaccaaccagaccaccagagctcccagggactaaaccaccaaccaaagagtacacatggaggaatccatggctctagctgcagacaaccttgttgggcatcagtcggcagagaagcccttgatctggtgaaggcttgatgccccagtgttggggaatgtcgggggtgggggggaaggctggagtgggtggatggatggatgaacaccctcatagaagcaggaggagggggtgtgtgataggggttttctggaggaaaccgggaaaggggataacatatgtaaataaataaataaataaataaataaataaataaataaatgtaaacaaagaaaatatccaataaaaatgaaataatatcgtttagaataatatcaattacaagtgacttatgaaaaacttagtaaaatgcattgaataaaaactacagaaatttttagggaaaattaaagaaaacttcaagaaaagcaatctatgtcatgcttgtggattgcattcttcaattcattaaggtagcacaacttatgttggaacaaccatacaaaaattgaatctgcgctgctaccaacaccataatgaaaattaatgagatgcaacatagacacaatttataaaatgaaacttgaatttctagaataattgcaaagaaaacttctgcaaatggagaacatacacaattttcttctttagatgccatgtgccagaatttgtatcttatacatatgaaaaataattcacaactaggaagagaatgttcagcaatccttcagaactgaggattaccaggattcgggcatctaaatgcaggtcatgtgggtggtatgcaaatgagcctgaattgtatacactatgcctattacagaggccaattcagatgaaaagtgaatcatacaagtatgacttaaggtagatgtgctgatcaagagtaggaaatatagacccacaccattaggaaccctatcagttatctagaaattgtgttgctttttaagtatcttctccattcattcctctgataataattcctcacccatcttttgctatagatacttctcctgaaatgatttctgtttcttttctcttctccacacatgtaaagatttctgtcaaccttgaccttataatcacaggaccaaagttctgtgttttcaactggtttggtatcccaagacagtttatattctccctaatatcacctctgcccactgactctatagaatggggcagcagaaaagcatatttgctttaggaatctcacatcagggtaatgatatgtacatatatatgtacatatcatattttcattatgatatatatcatatcgttattatatatatagatatatagatataattaccaggagctggtaattagaaaagttgagtaatttagagatatattggctaattatcatatcatattcacagaagccgttggccatggaaatcttactgtcaggtatggaatactaacctgtgagttattggtcaaataggctgttgggagccacccccacattcgccgtcacaagatggcgctgacatcctgtgttctaagtggtaaacaaataatctgcgcatgtgccaagggtattttatgactacttgtactctacctttcccgtgaacgtcagctcggccatgggctgcagccaatcagggagtgatgcgtcctaggcgaaatataacgctcctaaaaaaggggacggggtttccgccattctctctcgctggcatctctctggctctgcgcgccctgcgctctctcgctgcctaaagatgtaaacaatagagcgcactctgcgccccggcgcgccggagctctggctcctaaagatgtagattgaaggggctttcgtttttggggctgggcgctgggcgcttgccctcctggctcccaaagatgtaagcaataaagttttgccgcagaagattttggtttgttgcgtctttcctggccgggcgtgagaacgcgattaagaattggtgccgaaacccgggacgagaaattccgggacgagaaaaaatccgggaagaaaaaacccgggaggaaactcgggacgggagtttcaccggcgcagggaagatccctcattccagaaccagaactgcgggtcgcggtaataaaggttcccgtaaagcagactgttaagaaggattcaactgcatgaattcagaacttttcagctggggaacggcggtaacccgtaagtatagctttacgaggtaagcctggccttgaactttctaaggaaattcaagacagtctatcagaagtaaagtagaaaatagctttataaggtatgtttggccttgaactttctctagtgttagaagcccttttgttccttttcacatgttatcaagtggttaaggcagggcggattctggatgaagttcaggacaatctatcagaagtaaagcggggagagagaataggagcaaagaaaaaatatggttcacaaaataagtatacaggcctttccaagggtcttgaacccgaggaaaagtttaggtcaggtaagaatacctggggagagattagaaggaaggagaaggaaaaagaaaagaaaaaagatcaattagagaagccagttcttagtagttctgaatcagatgaaaaggctattagggcctggaaggcgctctcccgagcaggtgaagccactggacaataatgacagaggcaggctcttgcagcctacaaggtcttattgtccaccctggagttgtagatcaggattgtaaaggggaacttcaggttctctgttcttgtcctcaagttgtcttttctatatcacaaggggacagaatagctcaactaataattttgccaagcctacatggctgttttttcttcctctggtattcctagagctgccagagagattggttctactagaaatgattctgattacttaataatgcctttagattgttgtcaaattttatctactcacgtaggggtaaaccctcgtggcgtcaggccattacaggtctgacaaatggatgtcacgcatatttcctcctttgagagaaatcaatatttacatgtttagaagaaacccacttaaaaatgggattgtggtatatactgatggatcaaaaactggcataggtgcctatgtggctaatggtaaagtggtatccaaacaatataatgaaaattcacctcaagtggtagaatgtttagtggttttagaagttttaaaaacctttttagaaccccttaatattgtgtcagattcctgttatgtggttaatgcagtaaatcttttagaagtggctggagtgattaagccttccagtagagttgccaatatttttcagcagatacaattagttttgttatctagaagatttcctgtttatattactcatgttagagcccattcaggcctacctggccccatggctctgggaaatgatttggcagataaggccactaaagtggtggctgctgccctatcatccccggtagaggctgcaagaaattttcataacaattttcatgtgacggctgaaacattacgcagtcgtttctccttgacaagaaaagaagcccgtgacattgttactcaatgtcaaagctgctgtgagttcttgccagttcctcatgtgggaattaacccacgcggtattcgacctctacaggtctggcaaatggatgttacacatgtttcttcctttggaaaacttcaatatctccatgtgtccattgacacatgttctggcatcatgtttgcttctccgttaaccggagaaaaagcctcacatgtgattcaacattgccttgaggcatggagtgcttgggggaaacccagactccttaagactgataatggaccagcttatacgtctcaaaaattccaacagttctgccgtcagatggacgtgacccacctgactggacttccatacaaccctcaaggacagggtattgttgagcgtgcgcatcgcaccctcaaaacctatcttataaaacagaagaggggaacttttgaggagactgtaccccgagcaccaagagtgtctgtgtctttggcactctttacactcaattttttaaatattgatgctcatggccatactgcggctgaacgtcattgtacagagccagataggcccaatgagatggttaaatggaaaaatgtccttgataataaatggtatggcccggatcctattttgataagatccaggggagctatctgtgttttcccacagaatgaagacaacccattttggataccagaaagactcacccgaaaaatccagactgaccaagggaatactgatgtccctcgtcttggtgatgtccagggcgtcaataataaaaagagagcagcgttgggggataatgtcgacatttccactcccaatgacggtgatgtataatgctcaagtattctcctgcttttttaccactaactgggaactgggtttggccttaattcagacagccttggctctgtctggacaggtccagacgactgacaccattaacactttgtcagcctcagtgactacagtcatagatgaacaggcctcagctaatgtcaagatacagagaggtctcatgctggttaatcaactcatagatcttgtccagatacaactagatgtattatgacaaataactcagcagggatgtgaacaaaagtttccgggattgtgtgttatttccattcagtatgttaaatttactagggcagctaatttgtcaaaaagtctttttcagtatatgttacagaattggatggctgaatttgaacagatccttcgggaattgagacttcaggtcaactccacgcgcttggacctgtccctgaccaaaggattacccaattggatctcctcagcattttccttctttaaagaatgggtgggattaatattatttggagatacactttgctgtggattagtgttgcttctttgattggtctgtaagcttaaggcctaaactaggagagacaaggtggttattgcccaggcgcttgcagctctagaacatggtgctccccctgatatatggttatctatgcttaggcaataggtcgctggccactcagctcttatatcccacgaggctagtctcattgcacgggatagagtgagtgtgcttcagtagcccgagagagttgcacggctaagcactgcagtagaaaggctctgcggcatatatgagcctattctagggagacatgtcatctttcaagaaggttgagtgtccaagtgtccttctctccaggcaaaacgacacgggagcaggtcagggttgctctgggtaaaagcctgtgagcctaagagctaatcctgtacatggctcctttacctacacactggggatttgacctctatctccactctcattagttgggtggcctatttgctcttattaaaaggaaagggggagatgttgggagccgcccccacattcgctgtcacaagatggcgctgacatcctgtgttctaagtggtaaacaaataatctgcgcatgtgccaagggtattttatgactacttgtactctacctttcccgtgaacgtcagctcggccatgggctgcagccaatcagggagtgatgcgtcctaggcgaaatataacgctcctaaaaaaggggacggggtttccgccattctctctcgctggcatctctctggctctgcgcgccctgcgctctctcgctgcctaaagatgtaaacaatagagcgcactctgcgccccggcgcgccggagctctggctcctaaagatgtagattgaaggggctttcgtttttggggctgggcgctgggcgcttgccctcctggctcccaaagatgtaagcaataaagttttgccgcagaagattttggtttgttgcgtctttcctggccgggcgtgagaacgcgattaagaataggctccagagatcacccaaacaatacaggctattgtaattgctcttcatttcccactagaacttgatagtaagaccctattgctgaagacacaacacacagtgctaatgggacataggacatatatatgtggccttcttcttccagaatatctttcttattccagagagtgcaggatggtgagagaacaaagtcataaaaattcatatcctgttctgaatcctgtaagcactaataatgactagcaaggcaggatatgtcttctggtgcaatagtggcaaaactgttagtgggttaagcagtcattttccaattggatttgagacctgatctacagaaaagaacttataattggttctgtaaatctgatcaagtctgtggttatacaagtcattggccctaaaaataattactaatgctacattgctaaatggtcatgctcttcaactgccttctagatactcacgtttatttacatagattagtgataattttaaccttcaggagaagagtttcttcagtatggttattgcagaaatccatatcttgccaaaatactgaaaataaaaaatattagaaatgctcaaccctaacatctatagctataacaatccgagctcttagggatcattgtggaagtggaggcagacagaatgtaagagccaaaggatgtgtagctatgtagcaaaagtatgtcatctgaacataatacagaattacactcacaaacttactgtggtcatgttcatcttaataagactgtatatgattgggccatctacattttatcatatttggggcatgggttcataatacagtcccatgaaggactactgggaagtaacagtaattagaggaggggtgccattttcttcggtggtgtagttactgttatgctgcccttgttttaagaaataagctctcaccatgctcaggcaaaacaaaacaaaacaaaacaaaacaaaacaaaacaaaacaaaacttaaattcagtggttcacaaacataagaagtggaacttgttggaaagatggttattaatggaagaaggaagataaaggaggggaataaaaatgaaaatgactataactcattatataaatttatgaagctatcaaataaattattttaaaagaacatggtgatgagaaaatattagttaacgtacacattgttaaaactagacagaagaatgcattcttgtgtgttatacacaacaggatgattatgattaaaaataaaagattttgaatgtactcaccttttgcaaatgataaaagttgaggtgaaagatatggtaattgccctgcattgatcattactcaatgtctctgtgaatcaggatagttcctggaacttcataaatatgaatggggactatttgctagaattaattaatttcattcaaaatataaaaaaataagtaaaaacttaaaagaatgctaccaaattgatgtgtaataagactgattaatatatatgagggtacatatctgtgtttgtggcaaagctgggtgaagcatagggcctgaagtagcaagggggccaactgtttattctagcaaacaaggttttacacaataactgtagtgcttgggtgcttgccatttaatgcattgaattgctacacgctttctctctgaagttaggtataatttgatgtgataaaaatcatatttttaatagcttatttccagttatctgaaaacatgagtggatacactatttcctagaaatgtacactcataaactgaacagctctttcagtgaaacaatatttccagtaactatctccactcagaaactgttgactaaatatgcaggagtcagggggaaaaaaaggaaatttggaatggtcagtcagtcagtcgttatgacctccttaaaacaaatgaaagtctaaattttagagaacatgttccatttgtagaatttaccttgaaatgttagaatccattttttaaaatggagagaaaagctacagtagcctaacatgatggggaactcagattcttcaacttgaaagtattctactccacacaatgaacaacatggactttactatgactatacctaaatacccaagtaattcccattatttgtgtattatagctatacattttttcatggtattttttaaaaaaattattaatttttttacactccatattttatctccgcccccatccaccctccgattgttccacatcccatacctcctccccacacccttgtctccaggtgaatgcccccctcccacctgacctctaaattccctggggcctccagtctcttgagggttaggtgcatcatctctgaatgaacacagacccagaagtcctctactatatgtgtgttaggggcctcatatcagctggtgtatgctgtctgtttggtgatccagtgttgagaaatctcagggttccagatgaattgagagtgccagttctcctacaggatcaaccttctcctcagcttctttcagcattccataattcaacaggggtcagctgcttctgtccagtggttaggtgcaaatatctgcatctgactctttcagctgcttgttgggtctttcagagggcagtagatccctttttgtaagtgctccataccttcagtaatagtgtcacaccttgggaacccccctgatctggatcccactttgggcctcttcagattgtataaatctttcgccttttatttgagaattttgtatccctttcctcaaagttcagggatccttttaggaaatgggtcagaaagactgtaagatccagaagtgggagatagcttcaaggatacagtattttccagacacagcaggccagaagcacaagagtactcacagcaatatgacagtatgaacaaggtaaagccatacaaaagtcaacatggaaggcccatccttagctgaggatttcctggaatttgattgctgccgagagaaaaagagtccattttctcttagggtgaagagctcttgtgttgtgcgttcaagaggatggtgttctcttgagtaaatgaaacagcccatggaagataaagaaaatcaaccctggtaactgtcaataaaaagcaaagaaaaaagaatgaagtggatcgcctctgcttaccaagagtatttacaagccagaatgtctacttcctgctgagtcatacagaggtacaaaggttcctgctataggattttgtctgcaaccatctctcagctccagtaaagaggagggatctactttgagcttgaaaacttcctttttcctattttcttgtcttaactccccaaatatttagacctggaaacagcttcatcctgcctctcttggcatgagctccatgttattctggtgtgtgtgtgtgtgtgtgtgtgtgtgtgtgtgtgtgtgtgtgtgtctgtgtgtgtgtgtgtgtctgtgtgttgttttctgaaaacagtaaggtagaaaataaatggagaaacctgaatttttcctgctgagaataagcttctccctagagactgtacaataaagaccttcctcaactctctttgcactactgtcttgtttcttgaaaagggtctatgaattcagctactaatcagatcctatagaacaacatcatatagtcagaagagtcttattatgggatgctcccataaggagaattatgtctaaatgtatgggtatcagctagactcgggataaaggttacagctgatctgccattccctttatatcaatgacattaacaaaggagagctctcttgtgtgtacaatgtctctaagaaggagcaagataattatttttgctgtctttaaggaatgtgactcctaatcagacctttatacctgtgcatactctatgccacctgctcactacacagaaagataggcagatgagtgaggaattttctcagtttagaagccttccttattgtgaggtgtgggatacttaggttgttggatgtcctatttgagtgagtcacatctaagtgtgactttgggtcaaggtctgtagaaaatactgtgattcagaaatcccaatgctttccagagtggttgtacaagcttacaattccaccaacaatggaggagtgttcccctttctccacatcctcgccaacatctgctgtcacctgagtttttgatcttagccattctgactggagtgaagtggaatctcagtgttgttttgatttgcatttccctgatgattaaggatgttgaacattttttcaggtgtttctctgccattcggtattcctcaggtgagaattctttgttcagctctgagccccattttttaatggggttatttgattttctggagtccaccttcttgagttctttatatatattggatattagtcccctatcccatttgggataggtaaagatcctttcccaatctgttggtggcctttttgtcttattgacggtgtcttttgctttgcagaagctttgcaattttatgaggtcccatttatcaattcttgatcttacagcacaagccattgctgttctattcaggaattttccccctgtacccatatcttcgaggcttttccctactttctcctctataagtttcagtgtctctggttttatgtggagttccttaatccacttagatttgaccttcgtacaaggagatagaaatggatcaatttgcattcttctacatgataaccgccagttgtgccagcaccatttgttgaaaatgctgtcttttttccactggatggttttagctcccttgtcaaagatcaagtgaccataggtgtgtgggttcatctctgggtcttcaattctgttccattggtctacctgtctgtgactataccagtaccatgcagttttgatcacaattgctctgtagtacagttttaggtccggcatggtgattctaccagaggttcttttatccttgagaagagtttttgctagcctcggttttttgttattccagatgaatctgccgattgccctttctaattcgttgaagaattgagttggaattttgatggggattgcatgtacaaccactctggaaatcagtctggcggttcctcagaaaattggacatagtactaccagaggatcccgcaatacctctcctgggcatatatccagaagatgtcccaaccagtaagaagaacacatgctccactatgttcatagcagccttgtttataatagccagaagctggaaagaacccagatgccactcaacagaggaatggatacagaaaatgtggtacatttacacaatggaatactactcagctattaaaaaaaatgaatttatgaaattcctaggcaaatggatggacctggagggtatcatcctgagtgaagtaacccaatcacaaaggaacttgcacaatatgtactcactgataagtggatattagcccagaaacttaggatacccaagatataagatacaacttgccaaacgcatgaaattcaagaagaacgaagaccaaagtgtggacactttaccctttcttagaaatgggaacaaaacacccatagaaggagttacagagacaacatttggagctgtgatgaaaggatggaccatctagtgactgccatatgcagggatccatcccataattagcttccaaatgctgacaccattgcatacactagcaagatttcactgaaaggacccagatatagctgtctcttgtgagactatgctggggcctagcaaacacagaagtggatgctcacagtcagctattggatgggtcacacggcccccaatggaggagctagagaaagtacccaaggagctatagggaactgcaaccctataggtggaacaacaatatgaactaaccagtaccccggatctcttgactctagctgcatatgtatcaaaagatggcctagtcggccatcactgcaaagagaggcccattggacttgcaaactttatatgccccagtacaggggaacgccagggccaaaaagggggagtgggtgggtaggggattggggggtgggtatgggggacctttgggatagcattgaaaatgtaaatgaggaaaatacctaattaaaaaaaaaaagaaaaggaggaagtgaaaaggaaagtggagatgtggcagaaagaactaaattcccgagaggaagcctgggaacgaatatgcggcgagagagaccctttcatcttgtgcagtttgatgtggtcttgggttgagcaactgaaagagcctgtaatcaccaaagaggatgtggacatgctggtcgacagacaagcagatactgccgaagccctgtttttactagagaaggggcagtaccagaccatcctctgtgtgctgcactgcatagtgagcctgcagacgcttcccatgggggtggaggaagcttgcctttcacatgccattaaagctttcaccaaggttaattttgattctgaaaacggaccaatagtttacgacaccttgagaaaaatatttaagcacacgttggaagaaaagaggaaaatggcaaaagacagcctctcctgaggctttcttctctggacaagcatccaacctgagcatccacccctcctgagggtggcgcttctgctccccgccccgaggaccagtgctggccgcgcttcctgcctcagtccattgtcagtgccgcctccctgggctgaggatgacggctcctcttttagttatttattttaaaaatatctttgaactgtgtcttgaaaaattgccatgaagttggtgccactttatttactcactgacttgatgttgttgtgttggcatattaagtatgttgtatctttgcccttactcttgttgacattttagaggaaaaaaataaccctttcaaaacagttatttttttgacaaaactctttgtggagtttttaccaaatagatcattttagtagtaaaaccttactatgtatccttcccaagacatgtgtcccctccctcagaaatatgacctaagatagtcacaaaaaaaagaaaaaaaaaaaaaagaaatcccaatgctttctttctgtctgaggataaggttcaaagtgtacttccaggaaaagctaagatgatctaaccacagtctttcaggataatgagctcaaatatttaccagcatctaatgattttttttcaagtaagatttaaaaaatgaacaaaggaattgaaaataaaaacttacaacgagaaggaaaagaacccaaagaaaaagcacatgaaacagaggtcaactcatttgcccacttggaactctataaaaacactaaactggaagtcaaaatatatttaaaaagtatgggattcagaactcttccgatccagggcatgctgcctcggtctctgtgaggtcatatgtgcatgagttatgttcatttagacagctttgtcttctttgtgtcctttctccaccactggctcttacagtatatctgccttctcttccatgaggttcactgatccctgagaagaaggattcggtgaaggcatcctattgaagtctgactgtttcaaagtctctccttctgtgcatgatatctggatatgggtctatgcatttcttcccatctgctttaagaagaagcttctccaatggagacaaagtaaggcactgatctacttctctggcttaaataaattaatgacttttcaagaatatttcttatcggttcaaatacactgtggttttttttttaaacaggtctttgtttggcttccatctatttttgcacagtctactactgcactctctcctgactaacaatccctatagtctatgtcagaaacagtcctagtttctctgagctcaacctcaccctttatctttatacccacttaactgtatatgagaacatgctgtcttgattttaagttttaagtttattattatacttagctcagaagtttaaaatagtagagaatttgatctacaaaaaataattattcatctagggttatgcattctgagctgtgccaagaacaatttagagcagatcaatcttggaattatctagatattctaaattaaaaatatcaaaatacaactagggggtagataagacagtagagatgcccctttcagtattgtcactggatcaatcccatgattcttctgtagcaggcactcatctagaaactagtgagtaataggaacaacagtatttaatcaagaccttctagagtctcagaatcattttaaaagcttccacatggactttgtcatctttcccaattagtctcaatcacagcaaaaatccactggttttatggctgctcagaaagagaggagccagcaggttttgtcttctacatgttttcattctcattcttattcttaaaagaatgccactctcaattttcagtctcttttgagtgctctgtatcatttaattgatctctttaaagtattttttcatgagctttgttctttcttactaggtaaacttcaatagtaattccatatgtaactaaaagtctctcatataagctactatgtaatttcccactttattcaattattttttgcctgttacattttcccttcacgtttgccacccatagtcactgcatcttctatgtttcttgttgacaaaattagctgtgagtgaacagtgcaagctcgcttcctcacaggcaactcaaactcaaggaatttattcctgaatttgttgcctcctcaacctgcccccattctgggcacactgtatttccatctcagtgattgtaatgattgtgaaatcccattctcaattacattagtttctaaatctctttgtttcctgtccccacaatgtcatgaattaaattctcacaggaagatatatagttgctggaaatgccctgacagtcagcatggctgcatggggggatgtgtttggacaggaaaggatctgggcttggggataatttcaacataggacttttatgactcctcaaggaagtttggagctggacttcatctggcataatcctaatgtgaaggctacaggattcatgtcctcttttcatgtaaacaaatcattggacatgactgtgctaagacctgacaaggaactgggaagcaatgagaaagagccttcactagcttagacaattcaccaagaagatagttattgtcattattcgtagagcaaacatgttcatcagattcaattttccctctctatttctgatctagtgtacgctttcactgtcctcttcctagaaaaataatacaaagctctcattcctggtctcccagcttgtacccataatttaacatcatgtacatagggtgtccatgtttaactttctaaatttatgcagtacacaaagcctttcataaacatttctgtgcacacacacacacacacaaaatctgtccaagtgttctaaattcactctagcactttgaatttaagcctagttgaacatgttgtatttccttaaatagatcgtgttgaattgggacagctgtaccttttaaaagctctctcctgagtctatttctttacctcttatacattatcccattcttcagccagggaagacctatccacaaaagcttttctgacctttacagaaaagaaaagcaacttctctcctgtgaaacgattgctaggcgcagtgatgggtttttatgattctttccatctagagtcattataagactttatagataggagtggtatcttgagagctttacatgcctggtactgtggataattcctggaagatagcatgcagggaggaagaaggaagtggggaagggacaaaagtaggctcaaatgagtcttcaagtagttcctcaagattcttttgaagaacatattttctgacttctggttaatgtctatttaaattctctacacccctcacatccaagtccttttaaaaataaaacatgtttgcttctaagaagattggttcagagaagtttaaaaatagactgtttcactggaccaaaaaatgtgtatatatacacatatatttctcacaattagatctgatggtgatatataattgagatctaggaaaaagcaaatatgaaagaatggcatggagaaacagcagctctcttctttaagggactcttcattttgaaacagaagatacacaaggaaatgtttatgtgtgcatctaaatatgaatcatgttttaatttatcagtgttactaaattgtgtgccaggcagaagtaaaaattagaatgttctgatcgctcagtgtttgaagctacttctaagagaaaggtgaacctaaaatcattgtagggggagtctaactcaataaaaccctaacaagtcagtgacgacagggttgagatggttgactgatgaccactcagtcactctatgctttctgggaaatcagtgattgccagttgttgctccacattcttaacatatttgttatataaatagatggttgatttactgctcacagctgccccattgctggtttgatgtagcaactcctggctcttcctattgaagaatcctccctttcagattgtcagagtccatttattcttcagagctcacacaacattgcttcctttccaccctttataattagatcacattccgttattacagactttgaaagctctgaagtgtattcatctccaaaccttgcaaaatagttgcagttgaaggtttcctaagactaggatagaattagaataaataaccagagtgccaaacctactttggatgaggaaattaaacaaaaatacttttcctttgatgtgaaaagcaatatagatgaatctgtattgaataggatcattatgaaaccctgaacagttgacagggttatgccataatacactaacttctagaagaacccaatctctgcccccatgacctaaaactcctgctttagcccagcctgtcccatgactgccaagttcatgcattgtctggcctttaataatctgggagcaggtaagatgcagaattttcaaactcaggaaggaaaattttcctttgtgtgtgtgtgtgttttccttatcattctgtcctcaaatcccaccctggactttgctgccaaaagttgtctcagcctgcaggcctattggatgctattatctccaaaactccaaagtactctattatggggactggaaagaaaattattctggaaagttctcaaaccatgccctgtgacaaaatgtattggtatcagcaagacccaggcatggaactatggctgcgccattgttcatatggcattaataatacagagaaattagagctttcctttgagtgtaatattcagagaatgaatcctacctcatgttaagcacatttttcatacacagccctccacactcctgcctctttccaaccctaatctctattactatggcttcagcatctatttctgtgactttgtaccttgaacaatgaaggacctcaattgatgtcctctctcaacatccttgcaagatacctccttatgggacttttggctttaaatatctggtcttttgcttccaatgtgatatgctggctgggaagatttcttcacagcactcattgtgcaacatcatgagaacttagatttctgaaacctatataaaatctagatgcagctatatacacctataactccattcctgtgaggaggagagttgaagatagaaagatccttattggccggcccatccgtgttctaaagtatttcaataacttcttatattcttagtgtggaaaatggttgcatcctgtggacatgcttttccatccacttgttaaatgcacattcgatccatttcagttttaaattttttatgaataatgcagatataaagctttatttgtgaaaaaatggattttctggaagtgtatttgcaagcattagtgaaattttatattaaaaaaatttaagatatttgaatagaagcctttgcaaaatgttttcatagatttaaccaattctcagtcttatcatcctctgttagccaaaataatggctccaaaaatatctacctcctattactcagtaactatgaatacattactttatatagaaaaagagaatgaagtgtggaggtgtaattaagtgttcagctaactcaatacaacaagattattgtttggattgtatagctggactcagcctaaacattcatgtctttaacagtgactatggttagtgtgatgttgctttctttgaagataaataagagcaaccagagaaaggcagtggtctctaaaggtaaggggacagattatcccatggatactcaaatcaaaagataatccttcctgcctcttgatataaatccaacaagaattatacttaatttctaatctgtagtattctacatggttatcccgagctagtatctcgccagcaagaattcactcagacaactggattcttctacggcaaagctttattgcttcatctgaaggaagaccccgaacaaggaaactggtgctgcttatatacccctccgtgtgacgtgtcaacttctgattagctgctcactcatcaccccactactacaccccggaatgggcagtgacttggcacgaatttactcttgcacctgcgcacattacttgtttaccagttaggcacagcggaggctcatgatggcgattgctcacggctctccacacatggtagctttgtgattagtgttttatgatattaattttacagtgatttattacaccagccatagaaaagcatttcacaaccccatttccaagcaagcaaaagaaggcaaggctatgctaggaagtagtccaaggaaaggcaaagagataaactagggttttcatcagataatgccacttctaagagcaaatttaatttattgctatagcttgttccattcctgaaaatatttcattacagatcaaatttacatttcatcaagtgtctttctagtcatttttacctcagagaggggctgttctcataggaagaattctttcttccattcttgttggctgtagctagcagagaatgtgttggcctttgctaggtagctgctacccagcaaggcaagaatatttttacagaggacagaagtaatcttctgagtgtcaaatgattagaatgtgatttgtccttgtaactatgagtttcaaaagaaaactgactcactgtcccactcacacaaacagaaattcaccttgtatgagaaagtagcataaaatctctcaagaatactacatgatgtttctgtagcaaacatttaggaaaaatagatggttaaagtagaagatgaacaattccaaattgtacacaataatgataaagttacagtaaatagaaacttgtatttatttggactaaaggtgtcaaccttttacaatacatattaggttgtcaaaacaaaatgaaataaaactcctgctgtttttttaaaagcaaaacaaaagaaaactagaaaattgaaaggcagcaggcactcatttcaaagctgattctgggatcacacttaggctgtcagaagagccagccctgctggagagacccattctcatagtccataacttatagaaaaccagacgaagataccactgaacacatgggaatgaaatgtgacaaggaacaaggcatcaaaggagatatattaggtatgttttaggtgttgaaatagagtcaatgtggaaacatttcctatagggagaaataggccagattgctttaaaaatcagagatttattgctcacccaacctaagtgtttaagtagggatactgaaatattcaaaacctgtggttgaatgcagcatccataatcaagcaaagctggccacttcataacttcaggaatgcagttgcccctctcaggttccagtttcgcatctataaaatgaagtagctgacatatgcatctcagaactgaggagaaatttcaaagaaagcaatatgtgaataatttaacactggatcctcactgaaataacatttcaaaaatatcgttggaaaagtagcggtgagatggcactatgcgaatatatgatcatcaaagcttggacctctttactcattcactcatttcatcatcattgccttaacatgcccttcaagtcagtattctttgtatttccattgttgcaggatgagacgtacctgtctgctgtacttacttgatgaagtctaaaaccaatgcttcacagaactagttacttggagatagtatcttcaaagctgtaattaagtaaaatgaagtcacatgggtgacacccagtgtgcaaaatgatcaggctgcagatacagggaggaaagaccttaagggaaaggatgtccatctacaaatcaagaagataagcctctggggacactgtgtcagcgaacaccttcaactcgccatcagaaatgggaggaaaattaacatctgccatttagagcagtatgcagtactttgttatggcgatgctagtaaacaaacaacacccagttacaaaaacttgaccacacattgcataagtaacttgccccaagaatgggattcaagtttaaacacataaaaatttgtctcccttactatagtaggagctgtgcttatcttaaagaatacatggcttggcaaacaaaggatatgtcagaaaaggtgcacaaatatgacaggaaatgtggaatagaaggttttttttcagaactgaattagcctaagaaatacatacctagaagaagttctgttaagagaagaactagatgagaggtcagagttgaggactctggtttgtgtagcctccagagttaggaatgttcaattcagggtcccagagtctcaacccatggattgttgccttcatataggcttcctagtgggctttccggttggtttctacactgttctaacacaggcctcctagacttcaacgtagacttcaacaaaacataggcactgagaacctagctcagagaagctgtaagtattctgtaccgggatgttttcagagtatcaaatcaaattggatatccaggtaaacagatccaggataaagcataaagtttattcattatttctctgaagttgacacctttgaaaatgatgccctgggtgagtataatatttctcacaaaaccagtgaggtcttggagtgtaagtcagtggcaaagcatttacccagagtgcatgaggccctacgttcagactacctaccaccacaacaaagaaaaagaattatcaccccagacattttaatcttccaaccttaagaaggctcttagatttctctgtgctagcttatcaatgtagccaatcttttctgtacaaaatgtacaagtccaagttcacagtgcccatctaagtgcctaactcagagaagccacccacatacgaggaccttcctggtcctcaattatcctccttctctgtcttctccccatcttaatcatatcctactcccagttttcttgccttcctgatcataccaacttttgttgacataatataaattaatatacagcttgggtcttaaaatgacacaatcccaacctattccacacctgactgaaattgggtaggaggaatgctacattcctttctgaaagattgagggaaaaatccacactccatccatctgaccctcttctgtatagctaaggaagggtctatgcttttaaggacctgtgtgatcagatttggaccacctggatgtcaaggatgttctccctataccaagatctgcttatcaacagcctcagtgacttctgcaaacttaagtccccttgcctgtttaattaagtatattcacagattacacaatttaggttttaacttggttcaagtgacgttcactatgatactccactagagggcagtaacagattctgtaataaatacatcacgttgcaaataataatgtgagagtgtgacaaaattcaatatatatgcacacgtattttgaaaacacacagatttaatttgtattctcagggtctggtggtagagaacaaagtgatataaggtagagtatacctttcaaactgaaatagcttaagtgtaaagtgagttgggactacaattatgatgataattttgttagtccatacctgggctcaaaatcatacaaaagtaaagatagccatgtagctgaagtgcaaaacacatgttcttgtacagctgtttaataaatagcccctccactgaggataagatacaagcttagagttttgtgaagatatttttacccagtgtgggtagacaagaaacaaggcctagagttatgccttgaagaagggagaagataacagatacatatggcaaaattgaaaagtgaaagaagaacagggaagacaagacagtgtacctaacattagagtgcaaaagggagaaaaagattcctattttcttttaggtcttattgttaaaggcataaaattcttccttgtactgaaagtggaactgttccctcaaacttttaaatatgttgagcttgggcagaagagatcaaagggaaggtcatacaaagagtaggaagtagacaacttcctcctgtcataaaggtaccaggactcaagccaacagcagcatctcagtgccttgattaatacagaaaaggaaagatacaagtgaagcttcagggttgaaggcaaagggcagggaaggcatgtgtctgggggactaacttaactggaacaggacgagaaggcagaactggctactatctggttgtttcattttgtcttttattttccatactgatatgaaaagtacttaaggagaagtgataaaattggaagtgtaaccatattctctatagaagtcgaatcattgtaaacacaggaaaagcctgataaattagggtttaatatgatgtgtacgggtacagggccagatttctcaccgtaaaacgtgggtgtcagagttttcgataatattaaattacgttcttcagtatacttttgaggttagtaactactttccttttattaggaacatctaagctacatggaggatttctaaggcaatacaaacacttctgtcggaagctaaatcaaacttgttctccatgctttcttccaaaagagattgtagacaagaaaagaaaaactattccttagatatgatatgacaacaaccattcttctctcaatatgcggaataaaaactgatgggcctgccctttctaccacgaaggagtgtgggaacaaaagtcatagccatgagaactggaatgaaggcctccaactttcctggagttgaaaataatgcagtaaaattctagaaaccccagagaagctctggctgtgggtggaagccttgggaaggatggaggattctcttgtatttcttctcatccccaaaatactttgtttccaacacagcataaaagaagcttaaaagcacactattagcaaaagagcacattttgctgcagaccctctgtgtctctggtctgcgaggaacgggatttcttaggcagatgggcaaaagagtcggatgaagtgacaatcaggcacacacaagagaggtgttgaatctgaatgtaatgttctggttgagcttcagacttatattacaacgaattatcaaaggatacaaatcacaaaagacaagatacactgaaattcaccagttacagcagaaaggaatttgcagggactaattaaatgtttacattagggataacaagccctgcctaggatcagcctaatgccaggcaagaatttcacactttaaggttaaaagcatcagggggttgttaactcttgacaggccttaagagtaatgtgttatcacagagctctaaattcttaggtctagtaaaacttatcctgtctggagagttctcccttatcagggtagtatatcaacttatacttgatatggaatgtagcctgtagtaaaagatttctatctcagtgagacttttagtctctttctgcaaagagctgagttaatggcaagtgctttattgttttatggtagagcttaattagttactgaataggttaaactccttgctgctatctgcattctaagaacactgggaaaaggctttagctatgttagaatacaatcttaaaaggcatttactataaggtaatactatatagagtgcacgtggatccatacactagactaatgtggatttggaaaattaattttatgggttaggggaatagccaaagatctgggagtaagtttccttgaaactctttcctcatgagaaagctttcagactttcatctgaaaagctgactccaccggagtcccgtgacatttcatactataaatacatgcaacctttctttcctggatctaggaatttgacttatattgattatacatagaaattagcataagtatattttatgtaagtatatgtgcgtgagcatacacctctcgggcatcattttttgtaaatatataaacttacccattagatataaattaattaattaattaattattattccaaatatctctctctctctctctctctctctctctctctctctctctctctctctctctctctcctcctcctcctcctcctcctcctcctcctcctcctcctcctctccccccccccccgtggtgtgtgtgtgtgtgtgtgtgtgtgtgtgtgtgtgtgttcaccacatggctgcctggtggcagtggtagatagaagatgtcatcaggttcgttagtacaagagtttcacagaattgtgagttgtcttgtgggcaactctggaacatcatcaactctgctcttcacaaccaagccatctttcaaactcctatagtttttttttcaaactcctatagtttaattagaagaagtggaggaggaagaggaggaggaggaagaggaagaggaggaagagcaaaactcaaacatgctatgcattccgctagactcttctgggaaaggagagggaaaaagaacgtcaagaagcatataataaacactaggcaagcaggctctggcaagaacaactaactctcatctgctaaagatcaggggataggtgttctaagattttaaaggggatacatgatggcaaaataatctgtggtgtgaactgactgagcttttacacctttgcatcttttgaaagccagtgactaaggaaacccgtcagtgagtaggctaaggaagatacttggaatcttttctgcagtataaaaatagcttctaaaaataaaacactgttttgatagcagagtaagctttctgttctcacatttctaggtgatagtcacacgttatcgtgaggatctagaatacacaaatatttgaaaattttacaagagtgtgctaatacaaaaacgtggcacacgcgtacagacacattgccttaaagaaactgaggaaatgacatgaatcacaagagctgtttcaatgcctgtgaactcaccaaatagctgcagaaaagggagcagctttcctatctcaaatgtttctggcacccaagtacttaaaagagggagaaacctcactatactatttgcagccttgaggctatctagctgaggcaggggttttattctgctattgccatggtcaccagtctctcaagatgtgtggtcctttattttctatgaacaggtgagttctgaaacacatgagtgacctgtggctacagcttgtagaccaaagctcagatcttatcctagaaggcttcaccagtatctcttttcattcaactggctgtctcaacctctatcttcttcaatcgtagtctccacagaagcccaagtcatccaaatcgcaagacacctcatcatagatagtgggaagaagttgaaaataacttgctctcagaatatgagtcatgactctgttttgccatagatgagactcatgtctgtaatctaaagctggcttattactcaattaatgttgatattatcaacaaggaaaaagtctctgatagatatatcatctttagaaaatcttccagcatcgaccaggcatgtgtgcacctctgtgccatgagtgaatgcagcactgcacacccagctgctgtttacataaaaagaacacccaaaaggaacaagaagtctcttccctcggtaggccctactccagcccagagaaaggaacacctttccccaatgccaacagccatgaagccctctatcactccccagtctcaaaggttctcagcaatgcacttcccttctctgctccagttctttttttttattattatgtattttcctcaatgacatttccaatgctatcccaaaagtcccccataccctcctcccccacttccctacccacccattctcatttttttggccctggcgttcccctgtactggggcatataaagtttgtgtgtccaatgggcctctctttccagtgatggctgactaggccaccttttgatacatatgtagctagagtcaagagctccggggtactggttagttcataatgttgttgcacctacagggttgcagatctctttagctccttaaatactttctctagctcctccattgggggccctgtgatccatccaatagctgactgtgagcatccacttatgtgtttgctaggcctctgcctagtctcacaagagacagctatatctgggtcctttcagcaaaatcttgctagtgtatgcagtggtgtcatcatttggaagctgattatggggtggatccctagataaggcagtctaactttctataccacagagccttccaaaactcagacagagcaagttcctcccattaggtctagagtgccattgtacgactgtgtacctttcttcctctggggctttgatcttcagatacaatgaagctgcttctcaagcagctccgaataaattacaggctttcatattgctagttttattattgatatttttgtcagttttttctgagtgtgagtaggaatgtcacattctgagttgcttatgaaatcaaactgttatccactagcgtgcaagctcacagtgtaactgtgctctaccatctgatgaccttccacaccaaatccatagccacattttacacacttctaagtattaatttcattgtaacatttactaattttctctatccttgctattgtagtacaacctctcacctggattcctctgatcaccatccatctagtcacccagactgccagcttggcagctgttcctgccagtaagtcttccctgagctgaaaaccctacagtttctttattgaactattttgtgtgaattattttgtgaactcgtaagtctacatccctttttctgattatatttctgctttcctttagctgctctgactgcctgccttctcatacagaaatttcttcctccccagccccaaggtgtacactatgctaattcctctctcttcatcgatgatgcccttctatcagatcttctctctaagtgaggatttcctcatgtaatattagacacatacttgcctccaagaatactcctcttggcatcctgatgggtttagtgatcttctaactgcctggtgagttttctgttgagtattcttattgcaacctgagcaaagttagcataaatgcccgacaccatcatgagcttacccacaatggacggccatagtatgctctgttatgtagcctttgtcttcttaaaataggtaagtcagggctggtgagatggctcagtgggtaagagcacccgactgctcttccgaaggtcaggagttcaaatcccagcaaccacatggtggctcacaaccatctgtaacgagatctgactccctcttctggagtgtctgaggacagctacagtgtacttacatataataaataaataaataaataaataaataaatcttaaaaaaaaaataggtaagtcagaggcatgggtatgactgcacttggtaggccagactctatatttgctagctcttacacatatatattactgtccttcctacatcgtctgtattttgcccataatatctatgttcacagtttcactggggcacttgttagatattgtcatcaagacagatgatgagtctgtgatgcaactagaatatgtacattggcctggattctgatattttacctattatttgcttggctcctggagggctaagtgcaagcctttaagagctatgggttttcttaaaataagacttaagttttcctctcatactctaaatgtgtagatcctcttctctctatcatcagttagaccacaatcctgaaagtcacatcctcaatgcacaaaaatggttgtcaccaagggaagaggtgactcttacttctgagccctgactttactatgggaaaatgctgtccccacagaaaggaagcacccagaagcattattgcacaggagcatatttgaggtctcatgtgaagatccagctataacactactgagcatattcctaaaagatgctccaacatataacaaggactcatgctccattatgtttgtagaagccttatttataatagccaggagctggaaacaacccagatgtccatcaacagaagaatggatatagaaaatgtggtatacttacacagtggagtacaactcagctagtaaaaacaatgagttcatgaaattcacaggcaaatggatagaattagaaagtaacaacctgagtgaggtaactcagacacaaaagaacacacatggtatgtactcactgataaatggatattagccccaaagttcagaatacccactatacaacccacaaaacatatgaagcttgaaaatgaagaccaaagtgtagatgcttcaatcttacttagaaggggaagcaaaataatcacaggaggtagaaggaggcagggacctgggagggagagagagaagaaggggagagaaaagtgggagggggcaggatcaggtagggaaaggggcaggagagaaatacagagggttgggaaattgaatagaaatatgtagccatggggggttgggaaatggagagagccactagaaagtcccagaagtcaggagatcgagaagctccaaggacccattagccactgaaattatgaataacattagccaaaataccctacaaagggaagatagaacctgtagagacaacctctagtagataggcatggcctctagttgagggatttggtcgcctaaccatctcaaaacttttaacccagaattgtttttatctaaaggaaatgtagggacaaaagaaaaaaaaatggaaccgagactgaaggaaaggccatctagagaccacctcccctagggatccattccatctgcagataccaaacctcaacactattgccaagaaacacttgctgacagaattctgctatggttgtcccatgagaggctctgccagcacctcattaatacagatgcagatacagccaactatctgactgagcctggaaaccccaataaagctagggcaaggactgaaggagctgaaggtgattgcaaccccatagaaagaacaatatcaactaactggattgcccagagctcacagggactaaaccaccaaccaaagagaatacattaaaggatccatggctccagctgcatatgtagcagaggatggccttatctggcatcaatgggaggggaggcctttggtagtatgcaagcttgatgccccagcacagggggattgctagagtggtgaagcaggagtgggtgagtaggtggaggaccaccctcatagaggcaaaggggatgggaatgggatgggggtgttgcagagctgacaacatttgaaatataaataaatgaattaaccactaaaaacaacagattatttgcctataactcatacttttttgcttacccatgagtatacttgtggtgcaccactgtccccatcagcccttttgtcaaacttttaaatgatatttacaccattgctgtcaccaccaccaatggaacataaagaaaacaaatattttggtgagaggaattagctaattgcatattaaaagacatcaatgaaaattgcctctatctatggattcagaatggcaaaaattggaagtatctaaaaatgaatactttcagaagactaaactggtgagctcccagacacacacagtatcattccatatacatgtacgtaaaagtgcacatacacagagatacttccatgataacctctttcttctcttgacacctccacatgttttaatctacatgcaggaagagagtcatgggtgtagtcaaagacagtgacatcataagcactcaatatagagcaacaaaaggatccacactttcctcaaaaccaccatgagagttaggctcatctctgctgtggtgctgtgtttcctaggaacaggtgagtggtggaaattggtatgtctttggcaatgaggacaaactgtatactattacttctgtgccttgcctaacaagattttctagtatcaggttgcttgatggtcttgtcttcacttcctcttcttcaccacaggccttgtggacatgaaagtaacccagatgccaagatacctgatcaaaagaatgggagagaatgttttgctggaatgtggacaggacatgagccatgaaacaatgtactggtatcgacaagaccctggtctggggctacagctgatttatatctcatacgatgttgatagtaacagcgaaggagacatccctaaaggatacagggtctcacggaagaagcgggagcatttctccctgattctggattctgctaaaacaaaccagacatctgtgtacttctgtgctagcagtttatccacagctctacacagccacatcctttctacacaaaaatagtagatgggaaggatatgattttccctcatgcctaatgctggctttcatgtcacacttacgccacttagaaataggtggccaggaaagaggactctccatgcactcacacattagaaaaaagaaaaagaaaaaagacaaagcacaggatattctcactccttcataacccaaaagactaaaagacagtgtgaacttatcctgccacaaagtatcagctatccctaaactaaattcatgagcctgctacaccgtaccaggagaagtcctctttcatagtcacactacgtacagctctgtctgtcattttaataatttcacccttttggtttttaaccctccatccctttcactaagctttgtttactttgcactttgtcaccagggggcactcacacctttcagctctttacatctactttactgtctgtccttatccaaaggtttatgaagtttggattttatttatcccattaaaaacggaaccagtcttattagtaaaaatgtgacttcaaaatctcttatcagttgtatttcattggaaagtctccagtcggggcaagagtaaaccatggtgtaggtggttaggctctaactactctcacaaacacctggaaagtctgtttgtttggagtaatgaaacacagaaaactgagcctcaaattacaagttttttttaaaccattaataaggcaaaaccaagctccaacaatgtatttaaatttttacttttcatttatttatttattttttgcaggtgcatgtgggtgcatatgtgcacattttggtgtgttcattcacatgtatgtcagaggacagcttgcctggaattaactcatattgacaggggtggctgaagatgccaatgtccacagagcaagaaagttggtcctgtaaaaaaattattattccatgctacacttttatgcaaaggaacacaggaatgaaaagtagatatgtattataatgttgaagattaaatttacaagggagattaggtatgagcggatgtgggataatagaaggcaagaacagaagaactttgaaaaagaaaaactatgctctctgaagtgaaggaaaagactatctagtaaacaagagtctcccaactttagataacgtcaagaagagagacaatgactcatcacaaaatataattacttagcataaatataaggatctttggtgtatgtacatggctgacattacccataaatccacaaacactgctgagattcagagcaggtaaaagaaaaggaatggctctgagtaatgttttcattcccatcataccaggggtctttcacatcccaccaaacttgaattcctggttccatatttgccatgtttgccatcctagtttgaggtcccttcctgccatagctgccgctcatctccatcacaaccaagaaaggaaagtatgcagagatgcagtagcattcatggaaataaacacgtacaaagggaccaaaaggttgtggaaacaattttgagtttctgaataaattgaaaataatggttttttttggctaatatctacttagtagtggatattagccaagtacaaaattgccaggatatgattcacagaaccaagaaggctaacaagcaaaaaggcccaagtgagaatgcctcagttccactacgaagggagaagaaagcaatcacaggagggggaagagagggatggacctgggtgggaaaggtgacaaggaggggagtagaggaacatgatcacatattgtgggtggggatgggggagaaacacgactaaagccctgaggacaagtaaaaagaatggaagcaggcagccactgaaggaaggaggtggggggaccctctagaatgtaccagagacctgggaagtgagagactctcaggactcaaacaaagggaccttagataaaatgcccaacagtgggagagggaacttgtagaatctacctccagtaaaaagatagggcatcaagtggaaggatatggttgccatcccacagtcaaaaactctgacccagaatttttcttgtctgaaagaactgcaggaacaaaaatggagaaaagcatgaggaaaggaggtccaatgacaggcctaaattgagatccagctcaaggggaggccccaagacctgacactattactgatgctatagtgtgctgacaaacgggggcctatcatgtctgccctctgaaagacccaacaagtagctaaaagagtcagatgcagatatttgcacccactcaatggacagaagctgctgacccttgtggttgaactggagaaaagctggaagaagttcaggaggaaggcaacctcataggaaaaccagcagtctcaactaacctggaccccaaggatctcttacacactgagccaccaaccaggcagcatataccagctgatatgagcctcccaacacatatacagcagaggagttctgtgtctgtgttcaatcagagatgatacacctaaccctcgacagatttgggaccccaggagtggggaggtggggaagggggcatcctcttagagacaggtgaggggggaggaggtgtgggatatagaactgttggagggtagatgtagagccaggagggggataaagtctggactgtaaaaaagattaaagaagaaaaagaaaaagataaaagaaaataatgtttcaagaaaagtttacaatatatcttctcaaaggcacataaaacctcactaatcccctgaaaatatcccctattatttcaacacacatctatcatttcccagaaaaaggctgctttaagtctgctcatggaaccacagattttaattataaatttgagccaatataacagtaaattttccaatactaaatggaagtttcaggtggagtgaatttaaccaaaacatgttatgtgtatacataaaattctcaaacaataaagaaaaacaagtttttttgtttgtttgtttgtttatttttggtgttttgagacagggtttctctgtatagccctggctgtcctggaactcactttgtagaccaggctggcctcgaactcagaaatcggcttgcctctgcctccaagtgctgggataaaaggcatgtaccaccaccgcctggcagtttatttattttgattgaaaagtaatgtgtacaatgtattctgatcaggctttcccctcaggcaactctgcccagatcctcccacctcccctctcaccctatagatcagtgctatatgtacagatcagtgccttactctgccatcctcagagaagcttcctcttacagtagaagaaattaacacagacacccacaacttactagcatgaagggcctgagagattttggaacactcagtcctaaatgcaacaatatctttaccaaatcccttcccttaacgttcagggagcaatgcagaagagaaggctgaaagattttttttttctcataaaatatttttttaattaggtattttcctcgtttacattttcaatgctatcccaaaggtcccccatacccacccccccaatcccctacccacccactccccctttttggccctggtgttcccctgtactggggcatataaagtttgcaagtccaatgggcctctctttgcagtgatggccaactaggccatcttttgatacatatgcagctaaagacaagagctcctgggtactggttagttcatattgttgtttcacctatagggttgcagttccctttagctccttgggtaatttctctagctcctccattgggggccgtgtgacccatccaatagctgactgtgatcatccacttctgtgtttgctaggccccggcatagtctcacaagagagagctatatctgggtcctttcagcaaaatcttgctagtgtatgcaatggtgtcatcatttggaagctgattatgggatggacccctgtatatggcaattactagatggtccatccttttgtcacagctccaaattttgtctctgtaactccttctatgggtgttttgttcccatttctaagaaagggtaaagtgtccacactttggtcttcgttcttcttgaatttcatgcgtttggcaagttgtatcttatttcttcggtatcctaagtttatgggctaatatccacttatcagtgagtacatattgtgcgagttcctttgtgattgggttacttcactcaggttgataccctccaggtccatccatttgcctaggaatttcataaaagattttaagagtcaaagagaatggatgacttcaaggaaacagaaaaaaaattaaaattaaagtggaagttttcgcagtgttctttgctggaactaagtgaggtggagcttctgtctacaggaatcaaggacaatgagagcttgaagcagttgtttcttctctagagattccaggaactatataaaatatggtaatgttgatgcagagacaatactttgtacaagaaaaaacaatgaaccttattaaaataacttgttcatagccacacatcttgtgaacctggtcattgtgctttaatatttttttctgaattctacttatgatgtgttggctggtagctcttaaaaaaccctgccaaatgacaccccaatggtttagatattttaacacgggctaggtagccattatactcttttctctgattcctttttatacatgacacagctgaagaacctgatccttttagcaggatcattttcccactgtggatctaggattttgccaaggctataaaaccttgtgttgtttaggggacacacagcctatattttgctaacatttgtgccattggaaaactgtgcttcattttgaacttgttgctcatcatttctgttgtccagttgtcacaatgagacgtatatttgtgagtctgaattaaattcgccacattgtagattccacagtctcttattggttcactgtatcaacctcttagggaaacacaatctagcaatgtcctaagaaagggtcaaagaaaagtaaaagttttgtacctaacattaaaaaaaatgttttttaaaatatctttcatatctggggtttgtaggaaaatctgtattgaaaattatagcctgtctgaattttattgacttttccttgtcattttataattccctgttatcaaaaagttggtgactgccagagaaggaggagtcagttttccttagggatgttggacttaagaggctagccatagcccagtagatgatcctaagcccacacacatacaatgagcactaagtggacaaaaagagaaacatatggagtatatatatggatatacaaagatatatgtggaagcaggaatgaggggagtggacttgatccaaacacaatatatgcatgtatgaaattatcaataagtaaataatctgttatttatttttccaacactttcaatttttaaagtttataattttttattagatattttcattatttacatttcaaatgttttcctctttcctagcttcccctccaaaaatccactatcctcttcccccttcacctgctccccagcccacccactcccacttccaggtccaggcattcccctatactgaggcatagaaccttcacaggaccaagggcatctcctcccattgatgaccaacaaggccatcctctgctacatatgcagctagagtccctctgtatgttttctttgattggtggtttagttccagggagttctggggttcctgattagttcatattgttgttcctcctagggggctgcaaaccccttcagctccttgggtactttctctggctctttcatttcctgtgctccatctaatggatgacttagcatccacttctgtatttttcaggcactggcagagcctctcaggaaacagcaatatcaggttcctgtcagcaaactgtttttggcatctgtaatagtgtctggatttggtggttgtttatgggatggatccataggtcaggcagttttaggattgtcattccttcagtctctgctctgaactttgtctctgtaactccttccatggctatttagttcccccttctaagaaggataaaagtgtccgcactttggtcttccttcttcttgagtttcatgtgttttgtatcatgtatcttggatattctgagcttcagggctaatatccacttatcagtgagtgcacatcatgtgtgttcttttgtgattgggttacctcacttagaatgacatcctccagacccatccatttgcctaagaatttcatgaattcgttgcttttaatagctgattagtactctattgtgtaaatgtacaacattttctgtatctattcctctcttgagagacatctgggttctttccagcttcttgctattataaataaggctgctatgaacatagaggagcatgtgtctttattacaagttggagcatcttctgggtatatgcccaggagtggtattgctggatcctttggtagtactatgtccagtttctgaggaaccgccagactgatttccagagtggttgtacaagcttgcaatcccatcaacaatggaggaatgttcctctttctctacatacttgccagcatctgctgtcacctgagattttgatcttagccattctgactggtgtgaggtggaatctcagggttgttttgatttgcatttccctgatgattaaggatggaaattttttttttttttttttttaggtgctgctcagccatttggtattcctcaattggaaatttgttgtttagttccgtaccacattttaaatagggtttttggttttctggagtccaacttcttgacttctttacatatattgtatattagccctctatcggatttaggattggtgaagatcttttaccattctattggttgccaatttgtcttattgacagtgtcctttgccttacagaaggtttgcaattttatgaggtcccagttgtcgattcttgatcttacagcacaagccactgctgttctgttcagtaattttccccctgtgcccatatcttccccactttctcctgtataaatttcagtgtctctggttttatgtggagttccttgatccacttagacttgagttttgtacaaggagataagaatggattgatttacattcttctacatgctaaccaccagttgagccagggccattttttgaaaatgcagtcttcttttcactggatagttttagctcctttgtcaaagatcaagtgaccatgggtgtgtgggttcatttctgggtcttcagttctattccattcatctacctgtctgtcattgtaccagtaccatgcagtttttatcacaattactctgtagtacagcttgaggtcaggcatggtgattccaccagaggttcttttattgttgagaatagtttttgctatagtaggttttttgttattccagatgaatttgcaaattgccctttctaactctgtgaagaattgaggtgctattttgatgaggattgcattgagtctgtagattgcttttggcaagatagccatttttgtactatattaatcctgccaatacatgagcatgggagattgttgcatcttctgagatcatcttcgatttctttttacagaggcttgaatttcttctcatacagatatttcacttctttagttagagtcacaccaaggtattatattatttgtgacaactgtgaagggtgttgcttccctaatttctttctcagcctgtttatcctttgtgtagagaaaggccactgatttgcttgagttaattttatatccagctattgcagtgaagctgtttatcaggtttaggagttctctggtgggatttttggggttacatatgtatagtatcatatcatctgcaaatagtgatattttgacttcttcctttccaaaatttagttcataacagttttcttgtccagagtatttttaatcctcaggatttttaaattctgtcaagaaaagcctatgattcatttgttctattttcattaaacatacaggtgaacacatgtgtgatgtgaacacataaatatatgcacacatttgaaaatagatgggagagagaatgaaagacaaactgggagcatacttttataacagagtcttggaatcaggggaataagacagattagttttgcacgagtgtgtttctgaattttatatttgctttaagatgtcaagtttgctatttgcaattgccaggtagtaagacaccgtgaactgtaaaatgacacaatctttggctagattctgtaatgataagttaagctctcttatttagaaaactttccagtttgtaaaatagagtgacaatgatgtctaaatatcctatcctggcactggagtgatggctcagcagttcagagcacttggtgctcatgcagaagtcttgggcttgattcctagcacccacattgtaactccagttcaagaggatttcctcagaccttctcaggtaccaaaacattcatgcacatcaaataaaacaaatgattctgaatttttaaataatttagcccaaaaataacaatgataactcagaaaaataaaaataaaattaactctgacttttgcccacaaataaactatgtaagtacttatataagaaactgttagccgggtgtggtggcgtactcctttaatcccagcacttgagaggcagaggcaggtgaatttctaagttcaagccagcctggtctacagaatgagttccaggacagtcagggctacacagagaaaccctgtctcaaaaaaacaaaaaaacaaaaaaacaaaaaaaaaaaaggatttgctgtataataatgacaaaccataaccctgtggtcaaacttggaatgacctgattcattagtctatactgaactaaattagaataaaataaatattactacaaatgttcagggattaaggaaatatgcatgaaacatgcatacatatacatttatctattttttgtttttataaacaaagcaggcaatgaaaagtactttaatgactttctgaacctaaaagacaaaaataaaggagatgacacttattggaaggattggacttcagaaatagatgttaggttagtattgcatgcatgttgggcaaaaataagctcagttagagacagcctgatgaagacagcagacagttaaaattcattaaggccaatattagatctcatttgtgtttgtatactcaaagagtagcacatatgtggtgcttggtaatgatggatagatgaatgttgcacaggtggtaagtgcattctgggatgccttttgaatatatggctcattataagtgaatagctaagaagttcccctagagggcaacatattttttttgtttagtaagaagtcaacgtcctacataaagaaattaacagaaccagtgaggaagcaattacactgtgtggaggaaagatagttgtgaatgtgatactttagtggcttttccctagaaagagaccactgctaaaggatgtggacattcctgctacttctttggagccaaggtaggagccttgtcctgagctgagccttgggttaatgctaatgctgagctgaggtatgcagaaactttctctcccctaaaacagaatatactagttagaggatgagggagacatctcagattagagggttctgccagaaactgttgctaaaaggggagagtgtactgcatgatttggggaatagaatgatttcagggaaaataaaacagttttttctgcctgccgacaagtctgaatccaaacttgcttgcctcatggatctctgtctctcttaaactaggttctgtattcagtgtcctcctctaccaaaagccaaacagggacatctgtcaaagtggcacttcactgaaaatccagtgtgtggctgacagtcaagttgtttcgatgttttggtaccaacagttccaggaacagagcttgatgctcatggcaactgcaaatgaaggctctgaagccacatacgagagtggattcaccaaggacaagtttccaatcagccggccaaacctaacattctcaacgttgacagtgaacaatgcaaggcctggagacagcagtatctatttctgtagttctagagacacagtgctggttgcaagggagaaatctcagcgagaactccatctccttccactgaactctccccagatgagcctgaggtccctgttgatgaactcagtgtgaaaaccacagattcggctgacacctgttcatatgtctgtgggcaccatggatgtaaatggtagctgtgaatagagagagaatctttaggacttactacagacaccagtcacgagaaatgaagggcaaattcagttactctgttaagacatataatctggcttcaagtaacaaagttaaaatcaccccttagctttcatatcggtgacatagtctccttattatttctattttatctcacatgattaggtatagtgatggtatattatattaatgtttgtcgacttatcttgaccatacagtattccagatacacaatatgacacatgaatgatagatcagagtaaattttgcaaaatttcagtggcctgctatatttgtgagctttggagtatttattctaagaggtctgagtcacattggactctctcctttaataaccctcagcacgttattatcaccacaaaggaagaggtgcagtacgcattcctttcaacttaattgagcttggatatgttcctttggttgtactattcttgtttacttgttatataatctgcaaagctgaggtggtgcttgagaggtccagcagtgaagcaggcctgtgatgaaaggcctgttcctgttgcttgggcataagtcagcctgagccagatcttcttaagagtctattgccagaagcaggctgattgttgtgagtttgagactagtctggtttacatagttccaagccagccatagtatgagtatgtctttaaaaaggaagaggaggagggggaggagggggaagggaagggggagggggagggggagggggaggagaatatattgcaagacaaatgtggtggcacagtctttatcccaatccccaaggagctgaaagtataggagaatttggacctcaagtccagtctgtactgaacagaaaaacccagtttcaaaaatgaaacatctagaaagacaaagaaaacgaaaagggcctgtagttaatagagggtcttgtcaggattcctttagcaattattgtctatgaaaggaaattgcagagtaatctggtaatcaagacacacgtgcttcttgggctatttatgatttgcctgcctctttgatgtagagaactcatacctacaagttatattgagtgtatgtcatttatggataggcattttaaaagtttgattctagaaatatttcaacgccctccattatttcatcaatggctcattgggcactcaaacattcattatttaactcactgtatggtcatattgttgttggtctgtatactgtatatgcagagatctctggtgctatgtggcaggaacgttcaagcaaagggggagaacacaagctcggagagggatgtgaaaccttcttggtgctgactactccagctgcagccattgctctgaaatggatggtgagctgctgcgcagagccaagctgcatggggtgtcgtggtcatgtgacaggggcctggtcagaagcacgtgaacctcccactgcccctttttgggttccagggcttctaacccagcccaactttacctggtactgtttactaccccacatattgtgaacctttttcattgtcttttttttttaattaaatttttaaagactacaagaaacttttatggaagactaatgttatttctatctggatatacatttttctcatccttgtgttcgggaccttgttcctttgcgttttcctttttcctcttcctcctcttccccttcctcctcctcctcttcctcctactcttcttatttttcatttacttttgtgagtcacctatactgttggttattcttttcacagtgattctaatgaatttaatgagctgtcaatttccaaactatcttagccacatttagggccataatttctttgatgaagttgctgaacatgacatgaaacagatatcttacttcatccacttattttaaagttgttttttttttaattagctcactgctaatttttaaaatgaaatacttgaaatcttcattcatatttggatttttgagtagaataaaatgtacttattggggtgctgatattttaaagatattgtattcatgctttttagaagtaaattgagattttgatattgttatatattttgtgctatgctgaatatcttgttctgacttattctctattatgaggttattcacaactactactctaatgagagaaagcaacataccagtaacaacaacaataaccaccaccaacaccaccactaaacaacaacaacaacaacaaccagagttttaattttgtaactctcaactggagatagcaactccatcatcaatatttggaaaataaaagaactatgatagttatttaaaaactaagcatttacatattattagaatgaaactacttataattaagtaattaaaaggagagaacatgggcaaaaagaaataaaaaaatgaatagaaaagtatgtgggataaacatataagaaaagatactgttgctggagaggtggtttatcaagtaagagtgcttgatgctttcttctccctcccaagtcaaactgagacatcctcacttacaaggggggagggaaagacccaagagagaaatggggtgggtgatggagaggggaacatgatcaggcattggatgggagaaaaggactgaaatccctgaggaccagcagaaagaatggaaacaggcaacctctggaggtagggtgttggggggaccctccagaatgtaccagagacatgggcggtgagagacttttaggacacaaagggagggaccttagatgaaatgtcctatactgggaagaggaaacttacggagtccacctccagcagaaagacaagacatcaagtgagggatggggttgccatccacagtcaaaactctgacccataattgttgctgtctgaaagaattatagggatggaaatggagaggagcctgaggaaaagaacatccagtgtcaggcccagagtgggatccagctcaaggggaagtccttagactggacattatcactgagactcaggagaactcacaaaaagtgagctatcattactgccctccaaaagatccaacaagcatctaaaagagtcagatgcagatacttgcacccactcaatggacagaagcttctgaccactgtggttggattaggggaaggctgaaagaagctgaggaggagggcgaccttgtaggaggaccagcagtctcaattaacctggacccctgagatctctcaaatactggaccaccaaacaggcagcatacaccagcttatatgaggccctcagcacatatacagcagaggactcctggggtctgggtttagtcagagaagatgcattaaatcctcacggtggggacatgcttgtggagacaggggtacaggcaggacatatgggatgtgaaacagtcagacagtggaccgggagggaataaaatctggagtttaaaataaaaaaaaatatatatatagctacaaaaaaagaaagaaagaaagaaagaaagaaagaaagaaagaaagaaagaaagaaagaaaggaaggaaggaaggaaggaaggaaagaaagagaaagaaagaaagaaagaaagaaagaaagaaagaaaggaaaagagaagagaaaaggaaagaaaaggaaaggaaaggaaagaaaagaaaagaaaagaaaagaaaagaaaagaaaagaaaagaaaagaaaagaaaagaaaagaaaagaaaaaatagcgcttgatgctcttgcagaggacctatgtttagtttgcagcacctgcatgaggcagctcacaactacctgtaactccagttttagggaacctgtgccctcttctggagtctgtgggcacctgctttcctgagagagcataactcatacaggcacagacatatacaaataaacagaaagcaaaaattttaagaagaaatgatactgatggtgattataatatatatacagaaagacaaagcaatcaaatgaaacatttctttcttattgaaaataggatagatccatctgtcaaggatgatattcacagtttaccttggggtggggagcaagtgtttatacctacaaagtccaaataaactaaatcagaaatgattgtttgaaggctgagcctcatcttgtctgcccagccagaaagaatgcatgtggaagagtcacattgctcctatcagagagcctcattaatgcacaactctttaaaagtctccgaccagcataccatgtatgtttcatgtgaggaattttttaggtaccagtagttttcattgatcactgtaacactctgggattgttcaaagaattcaagcaaggctgtttttcaaatgaagctttaattgatcatatgtcctggaatcacagttctctactttagcacccctcacacacaacttgttgtagcaaaaatctgagtcctcctctctcagtagagttcaggatttagttgcacttacatattacacttagcttatctcattggcctgacagtacttttcacatagaaggatgcttctcttcattggagaacaagtatcaaccagattcctatgaccatactgattctcaggatgtatttattagctatagaaaatgggggacatttgagatttaaaattttttaaaagttttcttagctgatctccagatgagaggtttcactagatgccatctcccaaggttatgctccaacatatatgagcaacctgtgcattgccaataaattactattatctcctacaggttttgtggtatatagacctgtcttgttggtctgattttattatcaacttaggaaagaataatgaagcctttttaaagtgagaaccctaaacttctatttggtagagttccacttgagtgcactcaattcctttttcaacgatagaaacaaaacttcattagaaaagttgatttattacagttacttctctttctttgacttattttaatatgtaagtatatatattttaattataagattattaaaatgagaaatattgaaatcatcctgttgcaataaaataagatgcataatatgaaataatttggaattggacctggtaatctagtagtcttttgtaaaggttatttcattcaaatgttacttttatatttgtaaatatattttactctattgaccactatagttcatatcttcatgtttttataagctaaagcaatgggtgattcacatgcttgatgacagaattattaaaaaaaaaaaagaaaactgagtatgtgttttggtttgtttttgttataacttcaggatagaataaggaatccttctttaattccttcttttcatagttccttcttatgcaagtgttcattgtattatcatctcctcaatgaggacttccctgcccactcaccctgaaaactatgtcatattcatgatttatcctcaattgtaaacacctaatcactattttaaaaacaaagaatgtatgtttgtatgtattgataaatagatagatgaaaggtagataaattatgcttatttattttctgagttctgattttatatcctcatgtgtgtattggctcacaaatatacatatgtaagctaaatgaaagcaagatcctattctttttcctttgttttttttttttcactgtaagcactgaagtcctgaaatacaccagaaattccataaatatttgttaattaaatataacttaagttcacaaaagaactcaaatgatatgtactcactgataagtggatattagcccagaaacttagtatacccgagatataagatagaatttacaaaacacatgaaactgaagaagaatgaagaccaaagtgtggacactttgccccttcttagaattggaaacaatcacccatggaaggagttacagagacaaagtttggagctgagacaaaaggatggaccatctagagactgccatatccagggatccatcccataattagcctccaaacgatgacaccattgcatacactagcaagcattggccgaaagggccctgatatagctgtctcttgtgagactaggccggggcctagcaaacacagaagtggatgctcacagtcagctattggatgaatcacagggcccccaatggaggagctagagaaagtatccaaggagctaaagagatctgcaaccctgtaggtgcaataacattatgaactaaccagtaccccggagctcttgactctagctgcatatgtatcaaaagatggcctagtcggccatcactggaaagagaggcccattggacatgcaaactttatatgccccagtacagaggaacgccagggccaaaaaataggaatgggtgggtagggaagtgggggggggagcgtatgggggacttttgggatagcattggaaatgtaattgaggaaaatacgtaataaaaaatattaaaaaatatataacttaagtaaaggaaaaagttacaaagtagtggtggatttcttcacataataaagtaaacaaaaacctttacacattattctgatagaatgttaggcaggcataggaacataactgtaagcttagcattatccctcaagagctgaggcccaattgtgaatatgagtatacctgtactgttagagattctgttaccaaatctaaaattacaaggttgttccaaaaggaaagttctaaaaaccatttatttgaacaaagctatgaacttgattaaggctaccaatgtgtatgtacccactttccctctgatgactttcccaaggctgtgaaacacaacagatgttatgggttcggaaaagcaaagctaggaactggttcaagcataatgattttaatatacaagatttttcacattgacatcatactggttcctgggcaggtggacaattcttctatggggcttggatatctatacaggatatttctagtcatgttaatctagaatatatacatttatcagctatttgtcttccaagtgtatgacatattatatacatctttttaacaaagtcaagtgaagggagctactgactggttgactttaacatacagtattgtctatgtgatattatatggatgaagtatggtaatatatatgcattaaatgttcatctcatggaagtcacaggtgcttccataatgacagttcacatagagatcgctccaagacctacatttagtctcaaatcattaaagaattccaataaatacagaaggtgagtagagaaatagtgtccgctgtatagatctgagcttccatcatttcattgtacggcatggttaatctttaataatcagatcattttaactgctagtctttcttttataatcacacccaaattataaatggtgccagataatgagtaaaaaatggtaataacatcccctcaataggaaactttcaaattgttgttgagttcaaagtgggcaacagaaaagggggtgtgagggcttgtattagtcatacttttcactgtgaatgaacacctaatataagtaagtatcttataagaatgaatcatttattttggaccacagatttaaaattttgctggcacagtctgtaactctgttatttctgtgttgtggatgggcccggtgctgttcttgtgaaccaatcccctaatgaataaaggagccaatcactaggtgagtaggagggacttccaggttgaaaggaggcagagaggaagcaggagagagttaggtccttttggacgggacagcgtgaggacaagatgtagctattagtgtccctggtttcaatgatggatccattaggatttagattaaggaggatttagatttaataaggcttacgcgttaaaattttagttgttgtgcccagagattgagttaccgttgtttctgaactaagtttgtattgcgcttttcttcacacagaggctcatctgggttcaagagagaaaagtacagcaacaaagcataggtttgcctggggtgcaacaaaacggtcgaggggttcttgagtcgttcttgagtcatggtgtggtagtgacctgccagtggaaacctagagagctgggtggagatgttttgggagctcctggccagagagtctccatgagataataacaggtcagccattgcgcaccagtgcttggctggccaggccgccagggcagagagttgctggcacaagggcagaaatgtgctggttcattttaaaaatatttcccgcaacacttctgcacctatggtaaggctgaacctcatacatcttgttataaacaggacaaagagactcaatggtacctaagcaagacactagtacaaggacaatgacagtgatgtagtatttcctaaagagtggtcccatattctacctacttttcccagatcacccctaaatagaatgaagggctgtacacaatgccttccacaaggagttactgtgagatatttcacacaaactatagtgttctaactttgtccatcaatggctaatgcttatgttttcattcaagggcatctggtgaatctcaaagtatagtgactattatacaatgtttcaaaatctcagaaccactacatcctctgagacttaagacactctttttctagcatagagcaactattaaaattacttatttcccacccattaaagcacactgtatatcttctcattgtaagaaaatagggtagaagtttgagataaggaaaaaaataaataaaaccagacctggaatgccatgcaggaaatttagatccaaggtcaagcatttgggcctcttggggcataaagtaggctgtgagttctacaggagcttgggcagcccattcttttaggttgtagcccacttggcctctctgttggtccagctctactcattttctccagcttccctccagataagaaaactttatatcaaaggtttaaccttacaataggtgtagaagcaacagagccaaggattgtgacatgaagcttctgaatgtgtgacccagaataaatgatcctcttttataagatacttaaattgggtgtctagtcacagtgacatgtctatattcttggtaactgtaacttgctgggatcttgactgtgtcagctgcacctctgtagcatcatataataccttctcccaagctacctaccatggactctgacaatggtacatattgtaagacctcttttgtcttttgaacgttttgaatcaaattccttgaaactgtgaatgaaatttcctagaaagaaggcacaagtgataatgaatattctataggatgattaacttactagaactcagcagtgtggagatgttggaatgttgcaggttcaaaggctaattacaatttctttctccaccttttaatagtcatcactggctcaactgatgccactgagtgataccttttgcaatgtattgacatagtgttccaataactcagaagataagaatatcatcagagcatctaaggcttctatctaaggtttcccagcttcacagcaacccacaattctgatgtttccaacaatgcatttgaatggggtcatgacttccgggttcctttgatctgttccaaaaaattcaagaaatagtaactatattagaagataaaatttggataactaagtctgtgatctagaccatggttgctcatatttggctttagaataagctatacattctcttattcctttgatagaaagtttttattttaattctatgcttgttcatttctttgatttgtttgtttgtttgattggttaattaaattaacagttaataaaatccaaatgtggactctccaaaatgacttacttggtactgggagactcacttatatctgaggcaggtatcagccagagtattggtgtgaaaatatcctttctgcctcctatgatgcagggttttgttttgtttttttaattatttctgttttaaagctcttttagaggaattttaatccagcaacatggctgctctggcaatgaatcacattgaaaaatatgatctggctggaatgacggtaagccacacatctttaatccctatggctggaatactcctttaacacctttaatcccaaacaatgaggtctaattgattgactaatcaagacaaagtgactaatcaagaaagatttgacagaatgagtcagagataggtaatccccaactctcacaagaacaggcagggaagagagcctacttaacaagcagtgagggaggggcaattcaatccagctcagttcacagtaattcagtttggtgcagttcagttgaatgcagttgagagcagtttagttcagagcagggcagttgatttcagggtagttcaattcagtttatagatttcagaggcaatatttccaagcagagcaattcagtcagaaatgaaaggaggccaatttgtgtcagtcagcttggagaggattttgacctagaacagctaagttgaaccacccatctggagtacagcatgaactaggaagcatgagtttcttctgcagtaagtctttgaaagctgaaatattctgatcctaggttcgcagagtgaggctagacgttaagccttcaaggtttgggcttgtagaagattggattgtgtcttagtcagggtttctattcctgcacgaacatcatgaccaagaagcaagttggggagggaaggatttattcagcttacacttccatactgctgttcatcaccaaggaattcaggactggaactcaagcaggtcaggaagcaggagctgatgcagaggccatggagggatgttctttactggcttgcttcccctggcttgctcaacctgctctcttatagaaccaagactaaaagcccagagatggtgccacccacaaggggcctttccccctagatttctaattgagaaaataacttgcagttggatctcatgaaggcatttcctcaactgaagctcctttctctgtgataactccagctgtgtcaaattgatacaaaactagccagcacagattgtatggagactagaaccttccacgccaaggcccagaggtaaatggaaacacttgggctcagctcaagctgactatttccaccgctttagtagggctttcacctaatcactttatctaagaaaataaaagtggtatgacatttagatttacaagctattccttgacttgacgaatgatccctttgtttattctgagcttgtttttagagtgttaagtatattttggattgctttcaaagtatttggcttaagatatccattttatttctttcctttgaaagcagtttggtttatgactattcagttcatgaagattctagcattcagtctctttttctctagagattcctccactattcaattgaaaaagaataaaatgtttgggaaaatgtatttggaattatagatagctttattttggtaagtatgttattcaccttgtactttttcaaaaatttgaaattctaaatagagataatgtggctttgtgtctccccctaagaagtggcatttattatctgttaacttgcttattttgtactcttaactggacatactaggcaagagaataaaaataattttacatatgatcagtttgctttagttggaatctaataacatctgggaaaaaaacctgataaattggcaatttacatattagtaagatctctagaaatagctaagttaaagattttttaaaataatcagaaacataatttaaattttaaattctatgttagaattaaagatacattctaataaacctgactaccctaaagctactaattatctaaattctgcattaaaggaaattatgtttagttattctaggattatatctagcagaaaagatatctcatgatatactaagatgttccatttttaaaggccactctgccttttaatgtccatacacattcttgagtatatcttgctttctcctagaatgtctctcttctaacccttcttcttaaatgtatgttaaaacatttttaataaaatccccaacttggtttcaaactggctaagtgtaatttactctgtcaagtactagtctggccctagtcaagatcaataaaatattatgggaactcatttgactgccaatggttacattatacaactacatcttcattccttacatcagcatagcagtcatctaagaagcttcagccagcagctggtggaaacagatgcagaaaccccacccaaacaataggcaaagctgaggaagttttatgggtagaagagttgggggcagagtttagggacatggagaggtcaggacacaacaaaaatctagagagtcaactaaccaggtcccatgtgggcttatagagactgaaccatcaaaaaagaacatgcctttaatccaagcacttgggaggcagaggcaggtggatttctgagttcaaggccagcctgatctacaaagtgagttccaggacagccagggctatacagagaaaccctgtggatctcctaataattgaagctgaggctgtctttgattctgttgcctgcctttggataccatttctctagcagggctgccttttggggcctcagtggaaaggatgtgattaattctgctgcaagttgatgtacaatggagggttgatgcctatgaaggtctttcccttatctgatgagacaggttttctattctcaatatcatctatatttgatatgtacatataaaatcatatgaaattttactctttcttttatttttgtccttgatggatttttataactcttccacttttcttcaagcccatatgtcatgtcttctccttgatctattctgttagtgagactttccatggagttttgtatttgaattatgagtttttttcccttaaaaatttcaggttggatttttcttcactatttttaatctatttttttttcaattcagattttattatcttacatccattttttctctctacttagttgtttgcactcttaggtaagtatgctgaggtatactttccccagtattatttgtggaggaagctatctttcctaaagtatgtgttttgggcacaattctaaagatcaattagctgtagctatgtcattttaaggaaagccctctattctattaaattgttctacatatgtaagttttgttgacagtgcaggtttttggatgggttttgtaatgctgcctgttttttcctttctgctcagtattacattgaccactcaagcttaatgtgtattttggttttgtttaatttagttctgtgaagaatgtcattagaattttgaggcagattaaattatcatgtccatggatttagtacaggatcatatcacctttaaaaagtaataattttgctttttactttactttttctatctgttgagtatatagactgcactaattggacttagtgagttatcaaaagaaaagcataatgttgggagagaagcatgttgtgggaaatggatatgttatcatagtgatatgggattggatatgatgatattgccttgaataaatgtatgaaattctcaagaattaggaaaagatatttttgtttttcattatatttgaggttatattcaaatatttctcctttccaattctcctaaaaatttattttctatcctttcacgctgtatgcattcatatatgtatatatagatatatgcatatattcatgtatattcccaaatataatgttactttttacttttctgtatgttttagggctggctatttggcacttgacagtctgtaggtatgcttgctgtgctcctccctggccaagacaacctctctcccttccagttttcctcagttcttgcataggcttccctcttcatgggtgttttcctatttactttggcatgtccactgttgtcatacttgttccactaatttttggacagttgtgttgatagataagactttgtagttataggttctaatgttactagaagagaaaatctcacagcaaactctcagatccagtgactcttatagtctatttaccctgtcctctgcaatattctgtgagccttagatatgggagtattttttaggtgtagctactcggactggccttcacaactctctattttaattgagtgtgattttctgtagaagttaatgtctgttgcaaaaagattttttttttttttgatgagggatgaagagtatacttatttgtgggcataaatagaaaaactatttttaacttgaatatgccacaagaaacactcccctctgtagcaacataatggaaaacaagcccagcttttagaggaatggttcaggtatcagctccacatttccccctaagcagctatgaagaagtcacttcctttctgagatacagattgatcatatctgaaaatgaggtaacagtatgactgatctccctctttcatgcaacagaagcaggtaatagaaaagaacatgccaaccagaaagctcatgtcggagcatgccagcctagagtatggctaacatgctcaatgcttacaaattagatattgcatatgcattaaaaaaacctttttttcacttgtatagctcactggatctgtatgaaaagcaaagggatagaataaatacaggttcataaaagactataatctacagtgttaaatatatacatagaaataaatcattatttccaaattttaaatacaatgatttgaaaatgacaagcattaaattgggattaggaaaatgttttacaggaaaacacaaaggaatttgaatattagaatgagtagtattgggtatagcacggaccttcaaatggaaagtaaatgtctggttccctgaatctatcatactcatctcagtttagtgttcatacacaactgacaatacagcaactggtatatcttaagcagtgacctctggagactgtgctgaggtcagtgacaaagagttcatcaatgtatcccagagttgtgctgttgacaatgtaggttaagaaaaaagtcaagagacatttagagacctcctgaccacaatgccaagcaatgcaggtaggaaaagatgacctgcctgtagcctaactgctcaggtaggccatagaaacacaaaggcctgcctatcaccaagcaggaaagctcagtaaggcagagatattgagagatacacccactgccatgctaagaggcacaggctgggagagatgcccaaagacctgcctgacaccattttgctctggaaggccatagatacatagaagactacctggcactgtgctacacaggctggctgtagacacctagaggactgtttgcaagcacatcatgtggcacagacagaggaggtcacccagatgtccaacagctacatggaccatctgcagtgggagccactgtaatgtgcaagtgtgtgattgacagctggaagagaaagagaagcagaaacctttgagccttgtgaagggagatggaataggaggggagagggagaagaaaaatagcctgttgtgggtacccagtcccatctcctaaagccatggggaagtcctactctgtgataacactgggggccatgtgtgagactcttgctatgcagcttctgtgactcatattactgctaaagaccatagggacattgtctgggtagccacctgagaccacatggatgtctaggggttgtgctgaattggcccacccttcacaggctactgtgctcttgagagttggtcccaccatgggactacaggccctgtacctcaactgagcagcacaatgggattggccctggtggctggggctcaggtgaacttgcccctagggtgagaacatgggagcgttgttctgccactcctctgccatgaattgtgcaggcctggatgtgttacacacctcacacacagcttgttaccatcttcagcagaaggaaaaattggccactgggttctgagagcaagggaggtagccctgctcctggctgcctgcagcactctgtagagcaagtcttgcacctaacatgaaaagcacagtagagctggccctagtgtcaggaggttgggtgatgagggtgaaccaaccctgagggtgtgaatacaggagagctgccctaacactcatctgttgtgagatggtctgggtaaaggagttatcccctgtagtattatttttaaagacacatatacagcctttatattttaatatgctttaaacagcacaatagctgggcaactgtagctgccagcagccatggcttcctgggttcctgaacagaaagctgaggatggatggtaaggacagtgagagaaataaccaagacaagtttctctgatcaaggctcaatccttactttttgagtctgaacttaaaacggggagaaacccatcccccactatgccaggatctcatagcttgtcaggatctccttagaacaagctcaggctgctcagcaggtagtagagtcttgcaggaagctgcagatgtggcagacaatagactttacctaggttggaagacttcaccctaggtgggctagttggctgtggcaaaaacaaggtctgcttcagccagatcaaggctgggagaaggcacagttcctccctttttatttattaaaaattggctgaactggggcataagatttacttaggctgggggagggcacaggtaactgcctaacttccatgttgttagaatctatctcccactcgtaactccatggtcctatttactaatttctgtgttccatcgtgactgtccttgacccaactgagcagctctttgggcatgtgttcttgccccctttccatggtggctttgcttctcctgcctgtaagttattacccttccatggtggcctccatgtcccactccctcctcctcatggccctcaagtccagaaaccctaaaacctgcctatgtctctcctccctaactattggctgctgacttctttatttatcaattagaattaagtgcggcagggtcccagaagctatgtgcagaccctctgtgcagtttgggagacccaattaacagtagaatataagcaactataataccctctcctcctttaagcctcttgccacctgataggtcattagagatgaccccagctaaagtcatgaaagtagatgagctgcccttgcccctttccagctacagcacttgggatagtgggccctgcacctagccttggcaacacagtagagctggtcctattgacaagtgtagagttgagctagccatgtgggcattagcttagaagagctggccctgccactggcctgatgactgacctgaggtagagtacacaagatggtcaagtccttgctcctccctacctactgtagtcaggagaactatccctgagggcacgagagcaggaaagttgtttctgcccctctgttgtgggagagcaagccctgtcactcaccttggctacacagtggagctagtcctgatggagaaaccaagggtgagaaatctccaaggttctaagagctgcagagtgggcccagacccttgctgactgcagcacttatgagagtgagccctatatctaactgggcaacacagtggattgactctagaggcatgggtgtggatgaccgaaccctgaagtcctgaaagcaagagtactactgactctttcaggggttgggacaggatagttatagggtaacttgacagcagcagtgttaaagagcttccctggtgctatagataagggaaagcaagcaggctgccctgctcagctaccacccaggcccagattaagggctttaggttggatcacaccaaaatctacaaccattgtgaactgttggggttcatgaaatggcctgttatactgatccaaaagcttcaggaactctacaaaacagggcaacaataagattaaacaggaaagtcccagtgaggaaccaagtgagaatcaagagacctcaaacgagaccaatgactcattgcattgaatacttgcaagtaaaaatgtatgaacagaggggcatattttgggatagaatgtaatacatgacagcttatgttttaagatgtttcatgtattgttttgtttatgttgtttggtcattggttagtatatacattattttggggaaagtggcaagggaagagggcagatataaagagatggcagataactaggatttgagtggatattgataaactcacaaagaagcaaaaaaaaaacatttttaaaaagaaaaaacattacagcaacatattaactatatttcagaaaatttgcttactgtccaactaaccctaatgatatcctaactacctatctgctacctatgagcagccctgtgttgggtatgacctatgtgggtaagaagtcatagtaaggtaaggttcaaggttctgagacagagtgccaggtaaaatggtgttcaagctctgccaggaaaataatggtaggaggagctagatgtttaacttatctctctgggactattggcatgcttaggcttttagatgccacctgtggcaaatctcacacttcacaagggtttccatacctatttggagccttgagactatatgccaattttacatagtttcttagaaagaaaaagcatagatctgatgatagtatcttccttattaattacagataagtcctttttttcatcctctaccataaaacagttttcaaaagaagccctctttagggtctcaaaacaaaaatgatgtagtacatgactgttcagtgaaaaatcttgaatctgtcagaaattttacagatagaatagtgctccactgaggcatgaccccatgaggcatttaatgagattcagtgtacatgaggaagggctgtgagaatgaattctgttgtgtagctgcgccagttatggcggggatgagtacagaggtcattaacagtcctcacagggatgttttcccccagaacattttgctgtccacttgtttcaccattttcaataagtgtcatgtcaaaacaaatcactagatcatgaactcagacttttcttctttgatcagcatctctagtgcatttgttgaactctgcttgttgttgtccatgaacaacactaagatcagactaactaaaaaagtaagcaggttctgtaaagggtttcctcaaattagctcataacagtacatacaatctcacacatcatttcctcaatacactacctctaggcagattatgtctcaataaattgagtaccaggactcagtagctttgttagaaccattcacaaatcttttacaggaatgttttctctgaactaagtctgctataatagtgtcactgaaaaacatcgaacatcagaatccctctatatttttaatcctgatttgtattcatgacaacttgataatgtagtaatctctctactgaagtcaattctgtgaacagaaatcagactgtatattattcaagtccttcctcaaatctaattaatagacttcaatctcaaactgcatgtatctagaaggtagggaagttttaacctttaacaaagattattaatagaaccatgaagatgcagaaaatggactcaaaagaacaaaaaaataaagtagaagttcatgacagagaagaaagaggagagtgtggtttttgttgtatctctggaacatattgcagaaacatctactcaaatttcattcttcacacttcaaaacacttttcatatttaagctttattagaaaggagagccaataaaaagctgatagtacaaatcatatctatgtcttcctagtcatcttactaaatactctaatttttatttcctcaacaactagatatgaactttctatatgatgaattattgtatagctaatcatcatctcatagttattagatccagatacaatatttttttcaaatgggtctctaggtcctgcatatctgccacagtaccaataccattttcccatgatgtttgaggatatttaaggaatatggccattccctaacacacagcctcttcagatcagccttagaaaggctatgatgaatagacagactctatgttgccagtgtttcacaaaacctctactcagtctttccttgtctgcacccggagtaaatttccttatcacttgtacctcacccacacacagggtagacaaacagaacagagataatccaaggcacttggaaggagaaaaccacaggtgtgcttgtgaagaagtagagggaaccctccccttagtacctccttctccctgaactggggtataaaggcaggctttcacctagtgctcactaccttctgccaaaatgagagcactcctgttcctggcccttgtgggagctgctggtgagttccatgtcttaactcaggtcttgctcttccttcttttagaagccatgaaccccatcatcaaggtgactcttcaccccatctcaactccagtgttccctttcttccttcagcaacagttctgcttccaatctttcaagcttctctgcaagcctagtttcctaccccttccactctgacttatttagtgatcagagaatataaaaaaaggaagacacctggaagatacaggaaatgaacctatatgggcccaatagctcaggcctgattctctttacaaaggaaatgcctaagttgaaattttaagtcctcattaaactagagactattgaaatacttaacatgtgcataggaaaatgactcatagtaggagggatattttggtactatatatttttttaaatacccaaatgactttaagacctataaacatgcaatcaaatacaaaaatcaatgatctttaacaataatattatatccctctcttctttacaaggactgctctccattttccttaaaatacagacttaagctataaaaccccatgagtacatacccagaatattatctaagagatttccaaccatgggtaactctttaaaatatatgacagacaaaagggttcaaagaatgaggaacatgagatcaaaactggtagaggatcacacaaccatctctatacattattcctgcatacagatagcatcatttgccctatgcctgggaatccatgagagtgaagtcacatacagattatcttcctatagttttgcagtgctgtgtagtgcagtactgtgttgaacaagctgttccatgcctaagagaaatacagtgctactatcttgccatctcttcttgcattaattaagaacccctagttagttgagagctgagggctccacctaacaacaccttgagggattgtcttctcagtgatcttcttgtctttattcaagttgctttccctgtggatgatgatgacaagatcgttggaggatacacctgccgagagaattctgtcccctaccaggtgtccctgaactctggctaccacttctgtggaggttccctcatcaatgaccagtgggtggtgtctgcagctcactgctacaagtcgtaagtgatgggccctgtctgtacagaacacacacttaaccttttgaagagcagatagaagatcaggcaagaaataacctgatacggtgaatggcaacagtcacagtaaagagattagtaaattattgagtttagagaggataggagtacagaataggaagccctccacaccaaggtagatcattcaaactacctcaaatatgtagataaagaatggaaagttgattgtaggacagaatcaaaactgaagtcacacaaagactttcacaaagggcaatgctgggtcctataccatggtgataaacttagagtttcagtgagtgtggaaaatctgtgaacattttaaaaagctgtgtgtttctgttagtttcactataaagagggaactgagagacagtttgtataccagatagtgtcagacctgaacatgcatcagaaggagccagattataatttgaaaagtttagagggaaaacacagagaatgaatgcagagcaagttgggagatgccacagttacagggctattcttattacacactggaatagactgatcaaagtaacaatttttggaggagaagatttagtattgtgtatatgtgcaaagccacagaggaaaaatgaagatacaggggctattttgtttataaagggtagagggccaggagttgatgagcagtcattcaccttaatcatattacctgtcttcaaaacagaaaggaatctggtctcactgttacttgttgtccacatcactgtcacttttgtgatactcaatcaggcacctccctattctaagatcattcagcaaaaagtgtttaacaactctgaactatttgccgtgatggagaagaaaattataacatgattctcttcccaacagccgcatccaagtgagactgggagagcacaacatcaatgtcctcgagggcaatgagcagtttgtcaattctgccaagatcatcaagcatcccaacttcaatagcaggaccctgaacaacgacatcatgctgatcaaactggcttcccctgtgaccctcaatgccagagtggccactgtggctctgcccagctcctgtgcacctgcaggcactcagtgtctcatctctggctggggcaacaccttgagctttggtggtgagtaggaaatttcatctacttcttttgcaactttccagaagcaagagaggttctacactgaaattgttggcttctaagatgcaaaaccattgcaagtaccaataactccaagttctatagtgggtacaagagatatttgcagacatgtaaacagagcagcatgtaaacagagcagatgaagaatattctgttatcacttctaggaaggacatcaataataactattctatgatctaagtttcttgagggccttaatatcttgaaggatgctccatggtctgtagactttctccactggaatattaatgtctatcctggtttgaatcacattctctcttatcctttcttcaaagtgaacaacccagacctgctccagtgcctggatgccccactgctgcctcaggctgactgtgaggcctcctatcctggaaagatcaccaataacatgatctgtgttggcttcctagagggaggcaaagattcctgccaggtaattggcttcactctcacaaaaataatttgttttcctaggattggggttagcatgcccaagtgtatgaggcaggaagtttcctgtagtgactccatggaaaagtgaggagggctattctggaggttatttcaacatgtcagccagaacagaggatgggctaaccaagagaggcaaagcatggctagaatggcatcttcaggtcagagtaatgtggtcctttttccttgtgcctcttccttcaatactatatttctcccttccagggtgactctggtggccctgtggtctgcaatggacagctccagggcattgtctcctggggctatggctgtgccctgaaggacaaccctggtgtgtacaccaaggtctgcaactatgtggactggattcaaaacaccattgctgcaaactaagcatccctttgaagtcattatgtcaataaagtgaatattcccttactttctgtgtctctgatctctttatccttttgtctgtgggaaataccttactatttgaagtgatttctctttaccgtttaaatgttgtttgcgtcctacatctccaaatatgttgcatggaataatatttcagcagcagtttcaaagaaaacattaaatggtggtaggattacatgtttttttcttttagaaaaacatatattaataagttgatatttaaaatgttcatgttcacatgagattcatttttacttgtgaggtgttttgttattgtaatacacctgaaaataatttatatacagtaaaggtacacgaaagcatcagttcaggcctaatgattcctgaacatcaggactgtcgaaggagattacctaaacatttaaaaaaactagaacctgcaaataaaataatctgataaagtctgtattaacatttatgaagagtcatgaagctcttgccatttttcttgagagagcttttgccagttgtctaagtcttccttttagctgtggaagaacaaacagggatagccttgactggtcctcatgttaattaaaagtatccttgccaccccacatgctcatagttccttagtaaagcaggcctgtgatgtcatcacctgaaaggggctcacaaccatcagtaatgatgtttcctccaacagcatcccctgtggctctgttgtggttctggaggctccagggaaggcaatattgtctcatccagcatatgctttaggcctttctatgtgagtacagagcaagacacatatctgacagccttcagatgcagattcagcttttcaccaccctctggagtaacaggtttctctttgttcttggcaagtttctctatagtagaaaggtcacctgagccccatttgagtcccaacaagcaagaaaggagtctttggacagtggtgaataatctcaggcacccacttttcgttcacattttcaaatgaggatggagaggtcacaagaatcatactagaaaaaaacagttgtctggggataacttactagtcatagtctgtcataatcttcttgtcctaaagtatcaaaaagtccaagagtgtatggctccctaccaatcattagagtgactccatagttgtccaaaacagctggtacaggtacatatttttatggaaatttattcactgaataggatatcactaaacatgttttatcaacagcatcatcactgacaacccaattgtctgcactatagaaatagttttatacctactgttaatatttcaaaaacaatgatctctgattcttcactggggctacatgtgatttttaacccaacactttcattagcatgtacattgttaaggaacaaataacatatactttaaacaggagatttatcaatgaaagcttcctttaaaagtgaggtgattgacaggcaccatggcttggtgggactgttgttgaccctctcttttagaggcttgcaataacactttctggtatcataaaagctaagcttcaggaagaagatattcaagtcagttcagcttagcggtctctggtcctgtgtctgaaatgcatggtgtcttcaacaaaaagtaattattttctgcctcttgtgtggtaaccaattacagtaaacagtagctcataataatgtttcaagagtttcttgtacaaccccaagaaacaactcgaaagagggcttttcaaaggcagggtgttaggcttctgtttgatggtctttggcttttggagggagtattcttagcccaggaaagaaatttcattaatttgataatatatgtgaaataaaactttataacatatgaatatatgcacatatatacatatatactatacctttcttttaaggtttattgttataatcccatatcacatttgcagggattcttactgttattttaccttccagctttctttgtctatatttatctccctggctcttttatcacttgtcatttttcccatttctccaataaaatattttgtacaccattattccttccccattgctcttgcactttcctatcctgggattggtccctttacattcctgttttatttgtttttctttttatttgttttgtttatttttgtttcttttcctaggtattgcataatacatactcatatcttaagattagtaggtagttgctccaatgagtagtaatatgtgacatttgtaatttggggtctgagctaggatattttccagtgttccattcattcacctgaaaagttcatgatttaatcggtttacaagtgaataatattctatattgtgcatgtacaccatctcattgtttactaatttgttttacatttagatttttccatttcctagctctgataccgaacgtggcactaactggtgactctcttattgaactatacaagcctgaacaacaagagagaaagcagactagtactgaaaaccaacaaaatatctaagtctagtgaaggcattttgaagagacacttataaccctgcctttactaaaccaggacactactaaattacattctaaatatttgtccttatacctacattgatgtgcagtattcagtttatatatagaaatgtctctttgtaacagatggggatcattaaaaagtatcataaccaataaaaatgtggacttgtagagttcaatcccagtagatttgtctgcaaaacaactcttgccctgatggcttagggaacattgtggagagaatttggaaagattttaaaaatcaaataataagtgagtatgttgtgacattgtatctccaagttatgtcagtagctacacccataaaatctcaccaatatgatgcccacacataagctgaacaaggacaacagtaacaaaggtgccaaaatgaacatgaaaatgcccatgaggtcacacacaaccttaaacaatgaaacacaggtaaataaggaattttgagaatgggagaaatacaaatccccaggtagaatgtatcagttgaatatcaaataaaaaatggtgagtcctgagacaccataccccctcccagcctagtaccatgtgactctcacaggcagactatgcccaagacatagacagtagatcacacttgagaagaacccaacagagtgtcatgacccatagaggcagaacaagcatgagttaaccccaagccttgtgacacacaggcccagatgactactgcccagggtataccacattttagaggaccctgggcacccaaaggaccagaagaacattaaaatgaggaagtaagtgggagagagatagaaaataaaaagaaaaggaaagagagagagagagagagagagagagagagagagagagcgcgcgcaatggagactcaagaaatagcctgatgtgaatagctagggatgctatctaacaccatggtgaggcccaggcctgtgctatggccaaggccatttctgagcctctgtccctgcagcattgatcatctgttcccaccaaaggccagacagacatccctagactttgatgatccctgggcaaggttgatgggtgaagtatccagagctgcctagaactggtcccatcacctgggaaccaataaataggtagccactaagggttgagatcaggagagctgctgccacccctcctcaggtttagcacttgggagagtcagccctgcacatacagaggaaacatagtagagctgtccttggttacagaagtagcagatgaaccagcctgagggtatcagctcaggagatctggccttgcaacttgtctgctgcaggaggctatcatcaactgcagcagtcataagggatgacttcaaggtcatgagtgcaggagagctgtccctgaccctgaactgctgcaccacttgagagagaaagtgggtcctacatttcacctgtgtaacacagtagagtcagctccaaagcataagaatatgagagctggccctattccctgcctgctgcagcactggatgagctagccagcatagtgatggagagagctcatcctaatggtgttgttgtgagaaactggaaggccaacaagtgcagctaccacccagatccagatccagatccagatccagatccaggattttgggttggcccactccaacatctaccctatctatgaacttctggaatgtgtgaaggagctggtgctgcagatccaaagctgcaggatatatatatatatagttcactatacagagaaaattgcgggtcactttctatatcagagggtgttagacctgaatatgagtccaagtgataagcaaacaaatgattaaatacttaaacaaacaaacaagtaaatatgaaatacaaagatgagtacattttgaaaagaagaagggtttgttttctcactataaaaaccaatgaggaagaaggcaaatattttcataactggtaccttagtcctatggcaaaaaaaattatattcaagttttcaaaactgtagctgaagatggctttatcattcattttcttcacctgttgttttgatactctattaaaggatgagtaatcctgtctccaaaataagctctcaatcttgtgagtgtgggtgaaattgataataagttattaaaatatggactgcagtgtgttatggtctagattgtgcctcattgagtttgaagtcgagatcaagagaatgaatctcccactaagtctcagaacgccactgtgaaggtttagacaacagatattgaccctatcatttgaaattcaacaatacagtgtccattcaagaagaaatggggatgaagaattcccatgttgcctgaccaatgacacagtggataaaaagggcttcaaatgacctcttagttttataatgctagatactggaggtattttagaataaagagcaaccaactctgcagtccttcacctcaacccctgtacacaatctctatctgacaaacaaaaggagagagggccaaactaaatcctatccactatcccaatacttcttctatgatactgaagcagcgtctttcagttttcagaaccacagaagtgtaaagaacttagaaaacatgagatatcctgagtcacagagaaaaagacaaatctaagtgagactggtacattatattgaagactttccaaatattgaacaacttctgcatacctggaatgaagcctaccaagttaatcaagatgttttgattgtgatactggatttagatggacagcattttattgagtatttttgcatgaaggggtctgagctgacctgacttgaatgccttctctctgaggattagctttcatgataccagaaagtgctctgcaagactccaaaggagggaggcaaccaagagtcccacccagacatggtgcctatgagtcaactcaatttaaaaggaactttcatcaacagtctcccatttaaagtatatgtaatttattccttaaaatcatgcttgtgaaagggttcaggtaagcatcacatgtgataatacaagaaaattaggaacgtttttagtctcaacttattcatatatgtttttctggaagaaaataaacctgtaatccttccatcatttaattttttgaaactgctgctgaaatattattccatgcaacatatttggagatgtagggtgcaaacaacatttaaatggtaaagagaaatcacttcaaatagtaaggtatttcccacagacaaaaggataaagagatcagagacccagaaagtaagggaaaattcactttattggcataatgacttcaaagggatgcttagtttgcggcaatggtgtcctgaatccagtccacatagttgcagaccttggtgtacacaccagggttgtccttcagggcacagccatagccccaggagacaatgccctggagctgtccattgcaaaccacaggaccaccagagtcaccctggaaaggagaaatacagtattgaaggaagaggcacaaggaaaagggaccacattactctgacctgaagatgccattctagccatgctttgcctctcttggttagcccatcctctgttctggctgacatgttgaaataacctccagaatagccctcctcacttttccatggagccactacaggaaacttcctgcctcatacacttgggcatgttaaccccaatcctaggagaacagattatttttgtaggatagaagccaaatacctggcaggaatctttgcctccctccaggaagccaacacagatcatgttattggtgatctttccaggataagaggcctcacagtcagcctgaggtagcaatggggcatccaggcattgaagcaggtctgggttgttcactttgaggaaagaataagaaataaatgtgattcagaccagaatagacatcaacattccagtggagaaactctatggttcctggagcatccttcaagatattaaggccctcaagaaacttagatcatagaatagttattattgatgtccttcctagaagtgataacagaatattcttcatctgctctgtttacatgctgctctgtttacatgtctgcaaatatctcttgtacccactatagaacttggagttattggtacttgcaatggttttgcatcttagaagccaacaatttcagtgtagaacctctcttgcttctggaaagttgcaaaagaagtagatgaaatttcctactcaccaccaaagctcaaggtgttgccccagccagagatgagacactgagtgcctgcaggtgcacaggagctgggcagagccacagtggccactctggcattgagggtcacaggggaagccagtttgatcagcatgatgtcgttgttcagggtcctgctattgaagttgggatgcttgatgatcttggcagaattgacaaactgctcattgccctcgaggacattgatgttgtgctctcccagtctcacttggatgcggctgttgggaagagaaccatgttataatcttcctgtgttaatgcaaatagttcagagatgtttaacaggtttcgctgaatctgcttggaatgaggggacacctggtttaatatcagaaaagtgacagaggtgtagagcgcaagtgacatagggagagccaattcctttctgtttcaaagacaggtaatatgattgaggtgaaggactaccctttctaaacgaaatagctccctgtattctcatttttctctgtggctttgcaaagtataaaccatactaattcccctgttctcaatactgttactctcatcagtgtgtagtaagtatagtctatccatgcaactgtcccatctcccaactttctatgaattcattctctgtgttttctccctataattttcaaattataatctggctccttctgatgcatgttcaggtctgacactatctggtatacaaactgtctctcagttccctctttatagtgaaactaacagaaacacaccaatgtttgaaatgtttacagattttccacactcacagaaaactctgagtttatcaccatggtataggacccaggattgctctttgtgaaagtctttgtgtgagtttatgtttgattctctctatcctacaatcaactttcctttctttctttatctatgtactggatgtactttggataatttatgggtgtggaaggcttcctattctgtactcttattctctccaaatcaagaaataagtattctcttttctgtgaccatggccattcaccatatcaggttatttcttgcctgatcttatatctgtccttcaaaaggtcaagtatgtgttctgtacagccagggcccatcatttaatgatgtcccagtctagtggcactgttctcaggtaactatcactcacgttttgtagcaatgagctgcagacaccacccactggtcattgatgagggaacctccacagaagtggtagccagagttcagagacacctggtaggggatagaattctctcggcaggtgtatcctccaacgatcttgtcatcatcatccacagggaaagcaacttgaataaagacaagaagaaaactgagaaaacaattcctcaaggtgttggaagatggagccctcaacctaggggttcttttttcctcctcctcctcctccttcttcttcttctttttttttttttcaagacagggtttctctgtgtagccctggctgtcctggaactcatgttgtacaccaggctagcctcgaactcaaaaatctgcctgcctctgcctcccaagtgctgggtttaaaggcgtgtgccaccatgcttggctacctaggggttcttaatgcatacaagaagagaaagtaagaaggtagcagtgtatccctagtaggcataagacagtttggccgacactatactgcagtacacagcactacaggacaataggacgatactctctaagtgcctgcactctgataggttaccagggacataaacatcggtgctctcagcctgcagaaatatggtgcagagattgttgtctgatctactttctttgatctgatgatcatcattcattgacccccatttgcctaacactgctttcaagtgttttttctgttaggaagtattttacaaaatattctcaatgtataaagctttgtgtacccacagacttttataccttgattcaatatattaacaaaatatagagaacagacagaaagtttcagtttattgctgaaatcattgatttttattttattgcatattttaaagtcttaaaagttactttagtattttaatagaacatattgtagcaaaatggccttcttaatacaagttactgttccagtcacataaagtaagtattttttgatataagtctccactttaatggggatttcaactttaaactctataaaggcagccaaagattgggtaacctcaggtggtggaatcatagtcctgctggttcatttcctggaactgccttatgccttccttttctagtctctctgaccacattatacacgagagaggaaaggataataaaccaggattacagagaagcctgaaatattggaagcagagtagctgctggaagaagaaagaggacattggggtagagatagggtgaaaaggctgccttggtggtggggtccacggcttctagaagaaggaagagcatgggttaaggcagggaactcaccagcagctcccacaagggccaggaacaggagtgaattcattgtagcagaaggtagtaagcactagggagaagcctgtctttataccctaatgtactgagaaggagttactaatgggagggcccccactgcttctagacaaacacagctgtggttttccctcatacagagccttacatcatctatgctgtttgtctgctctgtgactatgtgaggtacatgtgatagggaaacatttcatcatattgtaggcatgaatagtggatgatttttgcaaaacagtagaaacatagactctatgtatgcatcgtagccttaggttcatgtaaagaggttatgtggtatagaatagacatcttcattagctataccctaatatcatgggaaacttttttatttatattaaggaagacctggtattggtatgtattggtggatattgaaacctcttgtcccatgtgaagaaacatggtatctggatctaataactatgagattattattattcgctctagaatagtttatcatataaaaataacatatacaaggacacagacatcagaattacagtatttaatagcatgtcaaagggagaaatagacatggtttgtactgtaggtttacttggctctccttcctaacaaagttcatacaagaaaagtgttttgaagtgtgaagaatgaggtttaagtagaagattccttaataagttccagagatacaccaatcccacattctcctagctcctcttggtcatcacctttgaccctcatttttcatgcttttataagtccattttcatggttctgttaacaatctgcatttgagaatcccttatttcaacacagccatttgagatagaagtctatagtcgacagtagatataaggaaggatttcaggaatacttggtgtaatttctgttcacagaattgccttcagtatagagattactttattaacaaggattcattaacacaaaacaatatgaaaaatataggaagattctgatattctatattttttaactacagtattatatcagacttagttcacagaaaacatttctgtaaaatatctgtgaataagttttaacaaagctattgtgccacatcatgagcatttatggagatatcacctgcctagagggagtatattgaaaaaagatatgtgaggttatatcaaaagttatgagctaattggaggaatccttgtacagaatctacttacttttttagctagtctgatctcagtattgttgagggacaagaactagaagagctaatgattaactttcctcaaattagacaattaacaaatccctcagagactagtctgtgcagatgagagtgcagactatagaagctacacagcttgtgggacaagcagaagtgacacagattctgggacagaccccattttgggctccagacatcctgcaacttccccaccagaggagaggtgtccgcctgggagggttctgctggagcacctggggagccatcttgggtcccagatcccacagagactagtctgcgcaggttagagtgtggactacagaagctacagagattctgggacaggcataagcaacacagcttctgggacaggcagaagctacacagcttctgggacaggccctgtttcgggccttcattttcagccaggaggcaggtccgaacgccagatatttgtgcaccttccctgtaagagcttgcctgcagagagtactctgaccactgagactcaggagagagctagactcccaggtctgttgacagaggctaacagaatcatagaaggaaaaagctccaatgagagacaactataacagctaactccagaaattaccagatggtgaaaggcaaacgtaagaatcttactaacagaaaccaagaccactcaccatcatcagaatacagcactcccacctcagccagtcctggatatcccaacacacctaaaaagcaagactcagatttaaaatcatatctcatgatgctggtagaggacatcaagaaggacattaataactcaattaaagaaatacaggacaacactgctaaagaggtagaagtccttaaagaaatacagaaaaaacacaaccaaacaggtgatggaattgaacaaaaccgtctaagacctgaaaagggaagtagacacaataaagaaaacccaaagtgagacaacactggagatagaaaccctaggaaagaaatccggaaccatagatgtaagcatcagcaacagaatacaagagatggaagagagaatctcagatagagaagattccatagagaacatgggctcaacaataaaaaaaaaaaagcaaaatgcaaaaagatcctaactcaaaacatccagggaatccaggacacaatgagaaggccaaatctacggataagaggagtagataagaataaagattttcaacttaaagggccagcaaatatcttcaataaaattatagaaaaaaacttcccaaacctaaagaaagagatgcccatgaacatacaagaagcctacagaaattcaaatagactggacaagaaaagaaattcctgctgacacataataatcagaacaacaaatgcactaaataaagatagaatattcaaggcagtaaaggaaaaaggtcaagtaaaatataaaggcaggccttttagaattataccagacttctcaccagagactatgaaagccagaagatcctggaaagatgttatgcagaccccaagagaacacaaatgctagcccaggctactataccaagcaaaactctcaattaccatagatggagaaacaaaagtattccacggtaaaaccaaattcacagaatatctttccacaaatccagcccttcaaaggataataaagggaaaacaacaacacaaggacagaaactacacccaagaaaaagcaagaaagtaatccttaaacaaatctaaaagaagacagccacaagaacagaatcccaactttaacaacaaaaaaagaggaagcaacaattactgttctttaatttttcctaacatcaatggactcagttccccaatcaaaagacatagattaatagactggctacacaacaagacccaacattttgttgcttacaggaagcccacctcagggaaaaggacagaaactacctcagagtgaaaggctggataacaattttccaagcaaatggactgaagaaacaagctggagtagccattcatatatcgaataaagttgacttccaaactaaagttatcaaaaaagacaaggatggtcacttcatactcatcaaaggtaaaatatagtaagatgaactctcaattctgaatatctatgctccaaatacaagggtagccacattcattaaagaaactttagtaaagcttaaagcacacattgcacctcacacaataatagtgggagacttcaacaccccactctcaccaatggacagatcctggagaaagaaactgaacagagaaacatggacactaacagaagttatgaaacaaatggatttaattgatatctacagaacattttatcctaaaataaaaggatataccttcttatcagcaccacatggtacttcctccaaaattgaccatataactggtcacaaaacaggcctccacagatacaaaaatattgaaattatcccatgcatcctgtctgatgaccatggactaaggctgatctttaataacaacataaataatagaaatccaacattcacatggaaattgaacaacaccctactcaatgattcattggtcaagatgaaataaagaaagaaattaaagactttttagagtttaatgaaaatgaagccacaacacacccaaacttatgggacacaatgaaggcatttttaagaggaaaactccccttccagtccggccagcaccggggtagctagggctcagagttgactgacacctgccagctacccacaagacctgccacgggatcttaagacctccggtgagtggaacacagcatctgctccaacccaatcacacgggacctgagactgcattaattagggagaaaacctggcctgatcaggggcacaagtcccttctggtccacgccagcacaggggtaccttgggcatggagtctacagacagagacaaagtttggagctgagacaaaaggatggaccatctagagactgccatacccagggatccatcccataatcagcgtccaaactctgacaccattgcatacactagcaagattgtgcggatagtaccctgatatagctgtctctagtgagattatgccggggcctagcaaacacataagtggatgcttacagtcctattggatggatcacaggacccccaatggaggagctagagaaaatacccaaggagctaaagggatctgcaaccctatagatacaacaacattatgaactaaccagtaccctggagctcttgactctagctgcatatgtatcaaaagatggcctagttggccatcactggaaagagaggcccattggacttgcaaactttatatgccccagtacaggggaacgccagagccaaaaagtgggagtgggtgggtaggggggtggggggaacggtatgggggacttttgggatagcattggaaatgtaaatgagggaattacattaatttaaaaaaaaagaaaaactcatagccctgagtgcctccaaaaagaaactagagaggagcatacacctagcagcctgacagcacacctagaagctctagaactaaatgaagcaaattcacccaagaggagtagactgaaggaaataatgaaactcagggctgaaatcaaccaaatggaaaccaaaagaactattcaaagtatcaaccaaaccaggagctggttatttgagaaaatcaacaagatagataaacccttagccagactaactacagggcacaaggacagcatcctgattatcaaaataaaaaatgaaaaaggagacataacaacagaacctgaggaaatgcaaaataccatcagatcatactacaaaaggttatactcaacaaaattagaaaacctggatgaaatggacaacttcctagactgataccaggtactaaagttaaatcaggatcagattaacgatctaaacagttccatttcccctaaagaaatagaagcagtcatcaatagtctccaaaccaaaaattagcccaggacctgatgggtttagtgcagaatactgtcagaccttcaaagaagacctaattccaactattctcaaactattccacaaaatagaaacagaaggtactctacccaattcattctatgaagccacaattactctgatatctcaaccacacaaagatacaacaaagaaagagaacttcagaccaatttcccttataaatatcaatgcaaaaatactcaataaaaccttcccaaaccgaatccaagaacacatcaatatgatcatccatcatgaccaagtaggcttcatcccagggacgcagggatggtttaatatacggaaattcatcaatgtaatccactatataaacaaactcaaagacaaaaaccacatgatcatcttgttagatgctgagaaagcatttgacaaaatgaaacaccccttcatgataaaagatttgtaaagatcaggaattcaaggcccatacataaatgtaataaaagcaatctacagcacaccagtagccaacatcaaactaaatggagagaaactcgaagcaatcctactaaaattagggattagacaaggccgcccactttcttcatagctctagccagatcaatttgacaacaaaaggagatcaaggggatacaaattggaaaggaagaggtaaaaatatcactatttgcagatgatatgatagtatatataagtgaccccaaaaattccatccggggaactcctaaacctgataaacagcttcagtgcagtagctggatataaaatcaactcaaataaatcaatcgcctttctctagcaaatggtaaatggactgagaaagaaattagggaaacaacatgcttcacaatagtcacaaaaatataaaataccttggtgtgacgctaactaaggaagtgaaagatctctatgataagaacttcaagtctctgaaggaagaaattgaagaagatcccagaagatggaaagatctcccatgctcatggattggcaggattaatatagccaaaatggctatcctgccaaaagcaatctacagattcaatgcaatccccatcaaaatctcaactcaattcttcactgagataggaagggcaatttgcaaattcatctggaaaaataaaaaacctaggatagtaaaacctctcaacaataaaagaacctctggtggaatcaccaggcctgacattaagatgtactacagagcaattgtgattaaaactgcatagtactggtacagtggcagacaggtagatcaatggaatagaattgaagacccaaaaatgaatccacagatctatggtcacttgatctttgacaagggagctaaaaccatccactggaaaaaagacagcattttcttttttttttttcttttttttcacagctaatatattttattaaaaaataagttgggaacaaaatagttcatatatcaaatttaaaggtttgggggactttagaaatgatgatgcatgtgaaaatttggacctataaagatgtagagatttttttttcttctcttattttttttttattacgtattttcctcaattacatttccaatgctatcccaaaagcctcccacaccctccccccacactcccctacccacccattcccattttttggccctggcgttcccctgtactggggcatataaagtttgcctgtccagtgggcctctctttccagtgatggacgattaggccatcttttgatacataagcagctagagtcaagagctccggggtactggttagttcataatgttgttgcacctacaggattgcagatctctttagctccttggatactttttctagctcctccattgggggccctgtgatccatccaatagttgactgtgagcatccacttctgtgtttgttaggccccggcctagtctcacaagagacggctatatcacagtccttgtaccaaatgcttgctagtgtatgcaatggtgtcagagtttggaggctaattatgggatggatccctggatatggcagtctcttgatggtccatccttttgtctcagctccaaactttgtctctgtaactccttccatgggtgattgtttccaattctaagaaggggcaaagtgtccacactttggtcttcgttcttcttcagtttcaggtcttttgcaaattgtaccttattgcctaggaatttcataaattcattctttttaatagccgagtagtactccattgtgtaaatgtaccacattttttttatccattcctctgttgaggggcatctgggttctttccaggttctggctattataaataaggctgatatgaacatagtggagcatgtgtccttcttaccggttgggacatcttctggatatatgcccaggagaggtattgctggatcttccggtagtactatgtccaattttctgaggaaccgccagactgatttccagagtggttgtacaagctttgcaatcccaccaataatggaggagtgttcctctttctccacatcctcgccagcatctgctgtcacctgaatttttgatcttagccattctgactggtgtgaggtggaatctcagggttgttttgatttgcatttccctgatgattaaggatgttgaacattttcaggtgcttctctgccattcggtattcctcaggtgagaattcttgttcaattctgagccccattttaatggggttatttgattttctggagcccaccttcttgagttctttatatatattggatattaatcccctatctgatttaggataggtaaagatcctttcccaatctgttggtggtctttttgtattattgacggtgtcttttgccttaaagaagctttgcagtttcatgaggtcccatttgtcaatcctcgatcttacagcacatgccattgctgttctgttcaagaatttttcccctgtgcccatatctttgaggcttttccccactttctcctctataagtttcagtgtctgtggttttatgtgaagttccttgatccacttagatttgaccttagtacaaggcataggaatggatcgattcgcattcttctacatgataacaaccagttgtgccagcaccatttgttgaaaatgctctctttcttccactggatggttttagctcccttgtcgaagatcaagtgaccataggtgtgtgggttcatttctgggtcttcaattctattccattggtctacttgtctgtcactataccagtaccatgcagttttcatcacaattgctctgtagtaaagctttaggtcaggcatggtgattccaccagaggtacttttgtccttgagaagagtttttgctatcctaggttttttgttattccatatgaatttacagattgctctttctaattcgttgaagaattgagttggaattttgatggggattgcattgaatctgtagattgcttttggcaagatagccatttttacaatgttgatccttccaatccatgagcatgggagatctttccatcttctgagatcaaaaaatggtgctggcacaactggtagttatcatgtacaagaatgtaaattgatcctttcctatctccttgtagaaagctcaagtcgaattggatcaaagatctccacataagaccagagacactgaaattaatagaggagaaagtggggaaaatccctgaagatatgggcacagggggaaaattcctaaacagaatagcaatggcttgtgctataagatgaagaattgagaaatggtacctcatgaaattgcaaagcttctgtaaggcaaaagacactgtcaataaaacaaaaaggccaccaacagattttgaaaggatttttaccaatcctaaacctgataggggactaatacccaatatatacaaagagctcaagaaactggactccagaaattcaaataaccccattaaaaatggggtacagagctaaacaaagaattctcaaatgaggaataccaaagggctgagaagcacttgaaaagatgttcaacatccttaatcatcagggaattgcaaatcaaaacaaccttgagattccacctcacaccatacataatggctaagatcaaaaattcaggtgacagcagatgctggcaaggatgtggagaaagatgaactctcgtccactgctggtgggattgcaagcttgtacagccaatctggaagtcagtctggagtttcctcagactttgcacataatactaccaaaagatccagcaacatttcttctgggcatatacccacatgaagttccaactggtaagaagaacacatgctccactatgttcatagcagtcttatttataataaccagaagctggaaagaacccagatgtccctcaacagaagaatgaatacagaaaatgtagcacatttacacaatggagtactactcagctattaaaaacaatggatttatgaaagtcttagccaaatggatgtatctggaaatatcatccttagtgaggtaacccaatcacaaaagaagtctttagatatgcactcactgataagtagatattagtccagaaacatagaacacacaagatacaatttgcaaaacacaagaaaatcaggaagagggaagaccaatgggtggatacttcattcctccttaaaatagggaacaaaatacccatgaaaggagttacagagacaaagtttggagctaagatgaaaggtgggactatccagagaaaacccaaccctgggatacatcccataatcacccaccaaacccagacactattgcatatgccagaaagattttgctgaagggaccctggtatagctgtctcatatgaggctatgccagttcctggcaaatacagaagtggatgctcacagtcatctataaaatggaacacagggcccccagtggagaagctagagaaagcacccaaggatctgaaggggtctgcaaccctataggtggaacaacaatataaactagccagtacccccagagctcatatctctagctgcatatgtagcagaagatggcctagtcggccatcattgggaagagatgtcccttggtattgcaaactttatattccccagtacaggggaatgccagggccaagaagcaggagtgggtgggtaggggagcagcacagagagagtatataggaaactttcaggatagcatttgaaatttatataaagaaaatatctaataagaaattaaaaaaaagaaaactaacaaatgttttagtgatgctgaacaaatagtaaaagtgtgagtttagaatctagtgcttgattttgacatgctactcatggaaaattattaaggaaatggacaccagaatgtactggaaatagcatccctgtgaggcctattaatatcttctgtaccaatctctggcctgactggcacagctatacaacatatttggtattcacagcctccctgaatctcattaaatggatcatggagtcatgcctaagtggagtactattctatttcaatttctgacagcttttcaagacatttaacataagaggcatgtactacatagcttaatgtgtggagcttcacttaccttttaaaaactggtgtatggtgaggataaaaaaataaattatttctaattaataaagaagatactaggactcagatggcttcctttattttttattttttcttttttctattttctttttttttcttttgccaagaacttatctaaaacttgcatattatctcaaggctccaaaaggatgtggaaactcttatgaaatgtgagatttgccacaggtggcaaagcaagccagaggtccctaagagataagttatacatcaggctccttctggattcctctcttggaagagtttgaacaccaaacttataatttacctggtactgtgcctcaaagtcctgcgttataatgacccctcacccacctgaggtatgtctaacacagggctacttacagccattaacaggctgttagtatattggacagtaagcaaattttctgaaatatagttaacgtacagttgttttgtttaatttttctttttgctgttaattatttcaattatttatatttcaaatgtttccccctttctggtcccctctccacaagcctcctattccaccccccccatcccttttgcctcaagaggtgctcccccacccacccacccactcccacctcacccaactagcatcctccttctctgaggcatcaaacctccacaggatccaacatatcccctcccactgaagccagacaaggcagtcctctgctacatatgctgtggggtccacagaccacccatgaattctctttggttggtggcttagtccctgaatactctgaggggtctgattagttgatactgttattcttcttatggggttgcaatctttttcagctccttcaactcttccctaacttccctaattgtttcctttagacaggaacaattctgagttaatatttgttagatgggtgtgtggctccatctctcatctgggggtcatggctatctattgcaggtggtcttttcaggttctatctccctgctgttgggcatttcctcttgtgtcatctccattgggttcttcaagcctctcagagctatgttgactggatttcctagtggttctctctctccacaccccacaatgctgcatatttctagtcattcttctggccccctgggcttctgttctgtctgcccccaccccaacctcatcctgctcccttctcttccctttccctctcccatgcttaacctctcatgtgtatcttcttcccccttttaagtgagattgaagcatccacatttgggcccttccttcttgataaggcttcacaatatccatgtatcagtgagtacatactgtgaggagcgggtgtggcggcagtctcaaaggcgccagggactgcagctaagtcgtatgacttgcacctgacttcctcatataagccacaaacatcctgagagctgcgcaggtgtaccaggataccggtgaatccattttgatggagatatgcccctgctgccctgattagctgaagctgcgtgcctggtgaggtggcgtagcctgctgtgcgtggatgtgaactgagagtatataagagtgagaggcccgggttagagggaggattattattcgagagaggattattattattgggagatatcaacgagggggagatataaacaagggagatataaacaagggagatataaacaagggagatatagagaaagaagaaacaggactgaataaacgtgtgcagaaggatcctgttgcagtgtcgttcttcctggccagttgggcgcgcgcaagaacataccatgtatatccttatgaatctgggttaccttacttagaatacttagttctagccattagcctgcaaaattcatgatgcccttgtttttaatacctgagtagtattccattgtaccacattttctgtacctactcttccattgagggacatctgagttgttttcagctgagtaccactcagctattaaaaacaatgactttatgacccagatgccatggatgcaaaatgttcctgggacccagtgaggatgacattagccaataacccaatgaaggggagatagaaactgtggacaccatatccagtggttaggctcagccctggttgacggatgggaccacccacgcatctcaaaaatatccaaccagaattgctcctgtgtaaagcaaatgcagggacaaaaagtggagcagagactgaaggaaaggccatccagaggctgccccccccccgacactatttttggatgccaagaagtgcttagagcctgatatgaatgtctcctgagaggctttgccagaacctgaccaatacagatgcagatgcttgtagccaatcatcagcctgagcatggagatcacaatggagaagttaggggaaggaccgaaggagctgaagggatttgaaatgctataggaagaacaacaatatcaaccaaccagaatccccagagctcccagggactagaccaccaaccaaagagtccacatggagtgacccattaatgggataagaggaccttggtcctatggaaggactttggaagttgaattaaatgcagctttttattttgctatggctagtaatggcccccacagactcatgtgtttaaacaagcctatgaggtccaagaagtggaatgtgttggcctgaatatgcttggcccagggagtggcactattaggagtgacggcattgttggaggaagtgtgtcactgtggtagtcaacgaagaaatcctcctcctaaccacatgagagccagtattctagcagccttcagatgaagatgtagaactctcagctcctcctgcatcatgacatccttgatgctgccatgctcccactttggtgaaaatggactgaacctctgaacctataaggcagtcacaattaaatgttgaccggtgttatggtgtatattcacagcaataaaactctaactaagaaaccactctcccaagtgttagatctgacaagggacaagtccatttcacccactctcatgaacctggggccaactctcctggcttcttaggtgttgagaagctcaggggagggacaacatcacccttatacccagacaatctcacagcaggtgagtggtggggttactctctagcactaacatacctagggatggctcacccctgaacaccccccaccccattactaggataaagtccattgtgcttctcatggtaggtgcaaggcctgatctttagctggccaggagcagggccagatatcctgctctcaggaccctgtgatcaactcttccttctgctgcagatggtgaggagctgagtgtgaggaggtcaacacattcaagcatgtactatctcatggcagactagcactcccatgctactaccctggagaaggctcacctgaggcccagacaacagggccaactgcacagtcctgcccaggtgaagcctatattcccaaagttgggccagctctcaacagcacagtaaccagtgactgtgggccagttcagcacaacccctggatatccatgtgacctgaggctgattaccagaacaggggcatctccatggtctttagtggtaacatgaagtacagcagttgcatagcaagggtctcagacatggctctcagtggcagcacaaggtgaaacttcaccatggtctcaggaggtaatgtggggtacccacaacaggctatttttttttctccctcacatctctagttccatctcccttcacaaggctcaaacatgtctgcttctcttttctcccatctgtccaccacatacttatatatcacagtggctcccactgcaggtggaccacgtagatgctgagcatctgggtgacctcttctgtctgtcccgcatggtgtggttgcaagctggccattaggtatctatagctaggctgtgtggcctggtggtggccagctctatggatgtctttccttgaactcactacatgtcacagtgccagtcagtctcctgtgtgtatgtggtctcccaaagaaacagatgtggcaggcatgtctttgggcatgtctcccagactgtgcctcttggcataacagtgggtggatctcttgatacctccttccaactgagctttgctgcttgatggcaggaaagcctgtatttgtctatggccaacccaaacagtaaggctgcaggtaggattgtggtcatgtttggcatgaccttcaacaggtctctcaatgtcttttgacttttccctcaacctccactataatcaggacagctatggtatgcattgattaactctttgttactgacctcaacatatcagccagatttttttcttgctgtaaagtgtttatattactttagaggaaaaagagatatttgtcctagtgttcctaccttccagcatatattggccaggtgacccacaatattatcctcaatatcatatggaaaatcatattaaccaaaggcatgttcagattgattgttctcactctgaacctatctgtgaagaaacatttaagggcatgatacaatggccttctatagctaaagtttgaaatttaaccatctaatattttgtgatcctactaatgaactagtatcaattttcacctagatattaggaatcatagacttaaaggactctagactgagataagaatagtaacaacattgaaccagccatttactttctacttgatgtctgtgttattcgaaatattatgtaccctaatatacggtctttttttttcttctgtagaacattcccatagtccccaatgaatgcttggtactgtcaaatctttgaatttaaaattcttaaattaaaaaaatataaaattaatttttgtgtatatttaaggctggagattgtagttttatgaacctgtattaatcctgtctgatcaaatgagctttacaattggaaataatatttttaagtttatgtaatagatgatgtgtcagcattgatcacagtagtcatactctaggctggcatgctcagagaagagcttattggctgtcatgatcatttctattacttgcttctatctcatgaaagggcatagaacacatactgttacctcattttcagataagaagtatctatagatctgaaaggaaatggcttctgtatagaaaccttcatcttaaaaattagtgttttttttctattatgttgctaaagagtggagtgtttctggagactctatagtggcatggacagcttaagaataatttttctctttatgccaacatagaagtatattcttcatccttcatctaggaaaattatgttagcaacagatagtgccacagactggactcagtcggtctctcaacccaggggatccaagattttggtaatccggtggacaaggagtcggcaaaacgtgacaaacagacattgacacagagagagtactgtatctgaatgtaatttctcaaagcaagcatcagacttataatacagaagaaaaacaagaaagctaggagatttgtcagccaaggtacattgagatgcataatggttctttatacaaaacagagaaaatgcatccataaaagctgacaggagccaggcagtgtttacaactgagataagaacagccctatctaaaatcagccattcacaggagccaggtgaaaagtctgatgcaatgctagtctattgttaaacccaccaccaggagtcccttactaaatacctaattatgctattcctctgggcttagtgaaaaacatgcaccatgggagttctgtgctactaatcctctcatgaataatataataatccagttcctccttaaactacaacccaccttctttctactataatgtaatgtaggctgccattcatgtctgtaatgagaattctgagtttattattttgaactagccctgaaattactagctcctatccagcaaaatgtgagatgcctgattactgtcaacactggggcatttcgtctgaatgagtaacattcttacaaaattccaagcccagggtcagctccagggctgcctaggacattggagaaggccaggaagcaaagttcaaactagcttaggtatttgataaatcatttcttggaggcacctataataaaacaatactgaaagaaagcacacagatccattcaccaactaatgcaaggacaagtttggagcattcatgctatgcaatgccaaagttccagaagactaggtttcaatgaaactttttgcctcaggactgtgtccaggcttttgggcctgccaaatgcagacttcactggagtgggtgtggcaagataataaccactacagaaaatcacaatcagtcaaaatacagaattatggaacccatcccagtcctaatggatatatctacaaaacaataccatacctagggctcagagaacatttcatttgaggggctagaaagactgtaagtgccaaagtattagggagtttgattagggagtttgctttgtgattatgtcctctagtaaattcagaatctagaatcaacaacatgagtgtccaaatatgagctgaataagtactacaccaaaggacatgccaaagtagatgagaaaacagccacaaggcttcaagcatacacaaagaactataggcaactgaggaaaactgtaagtaggagagttggtctttccagagaagagcacactaagcacactaattggttggcaggaatagcagtttgatccagaagaaaccacaaggctctgccaattagcccaagtctgtggaagtggcaagaagctgatagaataccaccaaacattatttggtgtgtttctctctatgaaatcaggacaaatgatgaccagtaaagaatgtcaaggctaactaataccatatagtattgtcagcatagactagcatcagaaaagcccaacaatgactagcaaagaatggtaagttgtaccaacactacactgcattgtccactgtctgttgggtgatatttataccctttccaaacgtcaagtgttctttcaagcatctggtctaacaaaataattccccgtttccagaatactcctaaaaaaaccaccatgtgtctgttctctacaaaatatcttcccatgtatttgcttcaccaaaaatatcctttcataaaacagtcccagaaaagcatcacatgatacaactaagtatccaaagaaaccagaaatttccacttcactccctagttccacctactggatgttggcttcatcttctgtttccaacagctgcttgatggagcttttcagaagacagttatgctagggtcctatctgcaagcatagcaaagtattactatattaatactaatataaatgccaggggttggctcttttccatatgatgtgtctcaagttgggccagccattggatggccattccctcaaccttggctctatctttatccctgcacagaccttgaagcaggacaaattttgagttgaagatattgctggtggatcagtgcccctgtccctccattggaaggcctacctgactacaggatgtggccacataagtttccatgtccccagttgcaaggagtcttagcttaggttaccctcattgactcctgagagtcttccccttctcaggtctctgatatatcccagaaatgcacacccaccaatttccaatctatcccagtcctctcctttcccactgtcctattcccaatgcacctgatccccacttcttttccactctccatccactctacacacagttctctccttccaaccacctccaatgtctattttattttccaacatggcctatgtaagagatagagatatagctctgtaatgtaatcagcagcagcctgacatgttcacatattcttttataggaccatagtaacatttaacacagtgaatcacatttactccacttgaaactgagcaacagattttattaaagatgttttactatagatctatagattagaaaaaaaaaagatatacttattgagaaagcaagacataccaaatatggctatggactaccaggagagaatgacctttacaaatggaaaatctcagtatagcatgaggtatcttgtctagtaggtttctttcttgaataggcaataaagataatttattttgatgctgaatttagataattagaaggttgaggacagtaaaatttatcagaatgaatctttagttcttacatagaatttaaattttaaatttattttctatttatctagacaagttgtaaattttatcagtttttcttgagctgttattaggttccaaatgaatcaagctgtccatattttaatttatttttatccttacagagaatcttttttctaaccaagctcttgacttgctgatatttgtagtggagaatgtatgagatttgagtaggaaatgtcttacatttgtttcaagatatttcactcttgtgttcatgtcatatcaaggatactcaggaaacatttatgtatacaaacaatgctgtctatgtataccatgtattatcaatgttgccttgggtatttatattaaaaaatagctaccttgtattctaggtcaagtagcctgtgcatgaagtctacaataattttgaagaataggtttgagcaatgtttaacctgaattctgaacaagaataaggtacacataaaaatggaagacatattttgactatatatgtaacaagattataatgctgtgctctgtcagtggtgagtctttttgtatgtgatctcctcctccctttttaattaagtaatcactgagatccagctttcattttttaagagtataatccagacatagaagagctgtacttaaattgtttgtcagcttgggtctatgtctaagatccaattggagtatccttcctataagaggcttttctctccactggctacgtgtatatggaaaagtacattggaggtaagatcatgttttggttccctgaaaaacagtgatggttctggagctggccattaacatgggaggaatgtagctaaaattgtggcaattgggtctgagagggaaaaatgaccagaagctgaagaaatgggaaatgagaaaaaaactgctaaaactgtcaatgctggcctcatagaatgttttagtcctatgactggcatgactgtatgagcttcacattcctgaacagccattcagagttgttgtatcttcatgctggttctcgtttatttgctcctgggcttactcctatgtggaaggtctgtcatattgccatgtctgtcaggcttttcagactgttcacatacttttatttttcacactcacgttagtgtgaggtattcaaaaaaaagagtcatgtggatggattcatttttccagagaaattatctaaaactggcatgcttccccaaggccataggtggatatggaaattattggagcttgtgagactgggcccaggtggcagctaaattctctgctgacaattaaaccagaagttccaatggaacacactacccacccattttccttctggcatttgccttcctgaaagaacatgagtgcagaattttccatttccctgatagtgcactatttcttaccacaccaggtaagtgggaaaatccatgtgtagaagggattacttaattatgaaaacaactcacatgatcattttcttatataaagtactatccatctttctcacatcatctcttcttagtcatccattccctttttcctgtgtcttttactgttctatacacccagttttaattctaagattttagccataatatttctgtgcaatgtgtaaagattattctcatattattcaaatgctcatttctgtatttcactatgttttcaatatgaatacagcattgtaagatttatgttaagagtgtcctgtcttacaatagaaatacctacaaagtcaactaacttaggtccatggtgactcacatagactgaaccatcaaccaacgcgcatgcagggctagaacgacttcctcaaccacatttgtagaagaagtgtggcttgggattcatgtgggtctcctaacaaactagagaggggactgtctctgacactgttgtgtaccactggattcccttcctgtacctggaccaccttcttgggcctaagagggaaaggaggtgctaagtcctgctggtgtcccagggcagggttatacccaaggggatctccctctttacctcaaagggaggagaattatggggagggatttgtaagggcaggactgggaggagaggatagagggagctgctattgggatttaatgtgaataatgtaaacaaaaaaatgcttctccaatctcaagtttgtgtaaacgatgcttacagtttatttcctgccttgtcaataaagcctggaaaagccaataactagatgataaagaaaatagagtgggacttcctggaggagaaaggattctcaaagagaggaaggaagaggaaattcaagcagggagttaggaaaattaaactaaaagattagaatagaattttaatgcctagttactgaccttttaaaattgttttaaattgtaaataaatcttgttctctttgtgttgttattgcggaacaggtatgtatttaaaaaatctgccacagcatacactttctgcatatatttataataatattgttacatggctttatgcaagtaaagcctaaaaccagataaggggtcaaattagggtgacaatgttgctgaagaagggcagggagagagcaaaaggacacagggaacatgaaccagagactagaggagatgttataagggacctagggggctagagataaggaaggtggctggggggaatctactaaaccatgatttggctaatttttataccaattgtaaatttaaagaaaggccagtaaacagggttaatgtctttcttctgagaggggtctgttgtaaggaaactgttttgtttaagagggcaactcagctgtctcatttcattttggtattctgggtgcatcaaggggcccctgatataatattggctgaatgatagcctcatgtttttatgtttcccagcctttaaaactagaagccaaacaataaacttctctcctctacaaacaaacaaaaaacccacagtataaatttcctccataaatttataatattattgttacacaggatatgcccttttataaagcaactgtttactcttattatttctaccctacttactatttctttcatatcacactttcatgtttttcaacaaggtaaaatttctgattatgaaatccaatgttcctctgtataatgaagaaattgtttctgttttcctctcaggggaaaaaaatgacaatttagtaaatgtctttaggttcaaggctggccataaataatcaggtaattttcaaataaatctctttgtatcccacttgaagctcttcaacttgtgtgtgtatatagctttcaattttcatgcccttggtaagtccatttggagattttatttattcagaagttctctctttttttttaaattaggtattttcctcatttacatttccaatgctatcccaaaagtcccccatacactccccccccacccccctactcacccactcccactttttggccctggcgttcccctgtactggggcatataaagtttgcaagtccaatgggcctctctttccagtgatggccgactaggccatcttttgatacatatgcagctagagtcaagagctctggggtactggttagttcataatgttgttccccctatagggttgcagatccctttagctccttgggtattttctctagctcctccattgggggccctgtgatccatccaatagctgactgtgagcatccacttatgtgtttgctaggccccggcatagtctcactagagacagctatatcagggtcctttcagcaaaaatcttgctagtgtatgcaatggtgtcagcgtttggaggctgattatgggatggatccctggatatggcagtctctagatggtctatccttttgtctcagctccaaactttgtctctgcaactccttccatgggtgttttgttcccaattctaagaaggggcaaagtgtccacactttggacttcgttcttcttgagtttcatgtgttttgcaaattgtaacttatatcttggttattctaggtttctgggctaatatccacttatcagtgagtacatatcatttgagttcttttgtgattgggttacctcactcaggataatgccctccaggtccaaccatttgcctaggaatttcataaatttattctttttaatagctgagtagtactccattgtgtaaatgtaccacattttttgtatccatttctctctcgaggggcatctgggttctttccagcttctggctattataaataaggctgctatgaacatagtggagtatgtttctttcttactagttggaacatcttctggatatatgcccaggagaggtattgcgggatcctctggtagtaccatgtccaattttctgagaaactatcagactgatttccagagtggttgtacaagcatgcaaccccaccaacagtggaggagtgttcctctttcaccacatcctagccagcatctgctgtcccctgaatttttgatcttagccattctgactggtgtgagatggaatctcaggcttgttttgatttgtatttccctgatgattaaggatgctgaacattttttcaggtgtttctcagccattcgttattcctcaacagagcaattgtgataaaaatggcatggtactggtataacgacagaaaagtagaccaatggaatagaattgaagacccagaaatgaacccacacaactacggtcacttgatcttcaacaagggagctaaaaccatccagtggaaaaaagacagcattttcaacaaatggtgctggcacaactggtggttatcatgtagaagaatgcgaattgctccattcctatctccttgtacaaaggtcaaatctaagaggatcaaggaactccacataaaaccagagacactgaaacttctagaagagaaagcggggaaaagcctcgaagatactggcacaggggaaaaattcctgaatagaacagcaatatcttgtgctgtaagatcgagaattgacaaatgggacctcatgaaactgcaaagcttctttaaggcaaaagacaccgtcaataatacaaaaaggccaccaacagattgagaaaggatctttacctatcctaaatcagatcgaggactaatatccaatatatataaagaactcaagaaggtagactccagaaaatcaaataaccccatcagaagttctcttttaatttggacataaatgagaactctctgtgttttaaagtaacaatggttatttttattgctagatgagttggtgaaactgaagtttcttccatggctggagatgtcattaagtgattttcttgattagataatatggaagaccaacctcagatctgggctacatcttgtagtggcagcccctaaaagcacattgcaaaatatttgctttttgtctgcattcctccatgctcactggtaagtttgtaaatcctataatattgtgagataatgatttgctggtattggaacctatattatgacctttacaagttcaagacagaaaatgtcccagaattgaaaggggaaagtggacacaaggtcccatctctatgaaagaagttatttacaactatatcttagaaaggaaatattagttttctccaatggagtgtcactgggtatatcaatcacagattaggaaaggccacatgaacatgcaagttgatcaacagaaaataatatccattgttatctaatatactttttttaggctctctctctctctctctctctctctctctctctctctgtgtgtgtgtgtgtgtgtgtgtgtgtatcttattaattttttgtggtagttgatttttgtttttatgtttttgaaagagcaagaaagatgaagttggttgtgtaaaaagtaggataataagtgaagatgagtaagattttaatatacaaatttaattattatcataaggaataataactaaagtactgaatgaattggatgtaatgctaggctagactaagatatttagcgaagagttagaaattatgaaagagaatcatattggtagtacaaaacagtatgaatcagaaaataatgctaggttagactaagatatttagcgaagagttagaaattatgaaagagaatcatattggtagtacaaaacagtatgaatcagaaaatatacaatggaaactattactaataagagtagccaagctgaaggaaagaataccaggtgtttgagacaaccttgagaaattatgaaagtggagtgatgaagtaaaaaaacaagactctaatctccaggacatctgaatagaaagtcaaacacataagtctgaggtgccttcctgctgtgctttccctgagagggtaggtacgcttgctcccttgctcttttcctatttggtacttctgctgaactctcatttttagcaccttaccaaattttcttttctttttctttctgctaaaatgttacaaagagtgggtcttactgtgacattttcgaggatgcatactattgtccattttccatattgattctcctattacagtctttgacatcctcaatattcaatctttacccccatttttctctaaccatctccattctacttttatgtatatatttatcttgggagtgaataatgtaatatttggggttttgagaattttgcttcacatgaaaagctcaagttccatcccttttccctgcaaataacattttctctatcactgactttaacttcatgaatttatgcataagttttgcttttaaattcagcattccaccctgagtcttttatttgaagagttaagaacatttatatttagttgttattgagagctaagtactaactcgcctaattttgctggttcttttcctggtttggttatatgttgtttgctcctttctttctcatctatacattttagtagtttctattattattattattattattattactaattgttgttgctgttatcacttaatttgccttaacctttttaaatttaaactcttacctaaaatagatttttccattcactacattatgatcccaattttccctcactgaacacctctccatccatgggggctcagttggcacacagttcaataagatataccccattcctggcactggaagttttgtttggtggtgagaaatgactaactgaagttttgtttcccctgatatttggtgattcaatctagatttgatttatttatataatttttaaaaacttatactgtaataagatttggtataccgtcttttacaaattctatttagccttcagtttaggtatctgtcatgatttttctttccttacctaccttttctctccacttctccatttgataattttgttccaacaccccacccatgtttatccataattatatagtccatttctttttcctcaggagaacttttacatccaactaatcccttactctatacctaacctctgggattatacggattgtagcttacatattaaggacttaaaacccccctattgagtcctaaatgtaacagtctggaccttcgatgcagtcccctagctctgaataaagtccatatggttacatttagcacctgcttggctcctttatgagtccttgctgtgcaagtccttgctgcacaaggacttgcatgtgaggcacaaactgaacagtagagacagcattggaggcaacacacagaagaaatccaagcatagacgaacctctgatcaggtatgtttggaattgtgcttttgtgctaaagaaagaaaacaaactgtgtataaaaatcaggtaaacatagtttcaaaataataaaataacatctttaagtagagagttaaataaaatttaaaaatgaataagacactcaaggatataagaaaataatgcaggatgtttggaccaatgaaaagataaatgacttaattgaaatgagcatgatactgattacaatgattattatttgggtattttttattttattcttaattgccacagtggctttctatgccttcctttaaaaaatggctttcaagaaaaagagaaatataaaaagtagagacaagccttagaagaaaaattagaaaaaaacgtaactagaaatgagaaaggtactcaaattagagacagagaaattaagacaagagcttactgaaccaccatgtaatgaaatcaaaagtcagccaaaagtttttagaaaactgatcttagattatccaactactatgcaacaaacaccaacacacagtagttacccaagatattgaaaaatttggatggcatctcataaatatgatataatttaaaacatttaaagaagctcccgctttatatggtatatgttcatggttcatgaagcaaatgttaatttcttgggggattcaaattagattaatcatccaagactggaaatgtatgtcaaaagcaatattagaatctggtcctcattacaatggtgatcatggtagtaagaagaaacaaagtagaaagaacagagaaatagggacgaaagtatcaaattttcccaaatcagatgctaggtaaaggtcaatataccaaagtacagactcgagttgaatatgatgaggccacattggcattacattgtattgcagttttaagtgcttgagataagattgaagtaacaagaaaaaggtctaaactatttactcacattatacagattacaaaagaaacaatcatttactttttacaaaggaagaccttagctgtaaattgaatgttatcagattcagatcctacgaaagcagtgataaagtgatctttggcttttgaaaatgctaatccttttcctctttctccacatcctcaccagcatctgctgtcacctcagtttttgatcttagcctttctgattggtatgaagtagaatctcagggttgttttgatttgcattcccatggtaactaagggtgttgaacatttctttattggtgagattgcaagctggtacaaacactctggaaatcaatttggcagttcctcagaaaattggacatagtactatctgtgaacccagctataacactactgggcatatacccaaaagatgctctaacatgtaataaggacacatgcatgttcatagcagccttatttataataaccagaagccagaaagaacccagatgtccctcaacagaggaatggatacagaaaatgtggtacatttatacaatggagtactactcagctattaaaaacagtgagttcatgaaaatcttatgcaaaaggatggaattagaaaatatcatcctgagtgaggtaacccaatcacaaaagagcacacaaggtatgcactcactgataagtggatattagctgagaagctcagaatacccaagatacaattcacagaccacatgaagctcaagaagaaggaagaccaaagtgtggagatacagagacaaagtgtggagcagaggcagaaggaaaggccatccagagactgccccacctggggatccatcccatatacagttaccaaacccagacactattgtggatgccagcaagtgcttgctgacaggagcatgatacagctgtctcctgagaggctctgccagtgcctgacaaatacagaggtggatgctcacagccaaccaatggactgatcacaggatccccaatggaggaactagagaaaggactgaaggagctgaaggggtttgcagccacttaggagcaacaatatgaaccaactagtacaccaagagcttccagggactaaactaccaacccaagagtacacatggagggacccatggctctagccacatatgtggcagaggatggcctagttggtcatcaatggaaggagaggcccttgatcctgtgaagtcttgattccccagtgtagcataatgccaggatagggaagcagaagtgtgtggggtggtgagcagggggtaggaggagggggatagggaatttttggaggggaatcaaggaaagactataacatttgaagtttatttatatatatatataaagaaaaatgctaattttgaatgcataatgataatcaagcacaaatagttgagtggattagaactatagctgaatagctgatgatgttgggtctcatttatatgatgaaactgtaatagaaataatctgtaaaggtttttaaaaatgccctactgtcacatgtcttttttttttttttttttttttttttttttttttttttttttttttcgagacagggtttctctttatagccctggctgtcctggaacttactttgtagaccaggctggcctcaaactcagaaatccacctgcctctgcctccggactgctgggattaaaggcatgtgccaccatgcccagcctgttacaagtcttaattgtgataatcaaggtcatttcaaaagaaactgtaggtagagcaagctaactccaaaagaaggtctgagctttctggagcatgcattaggtgtgggaaaggccagtattgaactaataaatgcaaatcaacaagagataaacagggtaaccccttgtcaggaaattcccaagagggtgtcttaccagtcttgatattaaaaatcatatcagccatttcaggtcagcagcagagaaactcatccacagaataattaaacaacactgctctgatgataggcattaacaatccagatatcaatgtcagagcagcttcaacagattatattaaaaactcagaagagaacagaaaacaagtaggttggaaaactactgtaaatgatcagaggacaattacaaataatattgaaattgaaggcatggtaggcataggagcagatataacaatatcatgagaaccttaatccccatattggcctttaaagtaagtagatattcaattttaggagttttgaactttattccagataaaacacagtataaaatggcctaaatgtataggtacagaaagtcaagtagaaaaaattaaaaccatatgtggctaattcagtcatggatttatggcgaagagatctattgcaacaatggaaaacatggattagcattcctccaactccagggacaagacataaaataggaaatgttcctgatcaaggtattgaaaaatgttactgagagcagtcacagactatccaggatatacataagcagaacacagcagaggcttattcacaaactttatatgaaggaaccaatgttggcaaaacaccagtggccctacatttaaggtgattgactcatggacctgtttggggagagcaatgacttataacaagagaaaaattacaggcactagaacagcttgtccaagatcaagtcaaggcttaatacaaagaagagtctaccagcccttggaattctcctatattggtcattaaaaaggagctagagaaagtacccaaggagctaaagggaactgcaaccctgtaggtggaacaacaatatgaactaaccagtaccccggagctcttgtctctagctgcatatgtatcaaaagatggcctagtcggccatcactgcaaagagaggcccattggacttgcaaactttatgtgccccagtacaggggaacgccagggccaaaaagggggagtgggtgggtaggggattgagggggtgggtatgggggacctttgggatagcattgaaaatgtaaatgaggaaaatacctaataataaaaaaatgttaaaaaaaagaaatttaaaaagtgaaagatctaacagatctgagagcaatgaataaaatcattcagccaatggtctccttacagtctggaattctattgacttatttattatctaaagcatggcctattatggtgacttattttaaagatttctttttcacaatccctttgcacaaacatagtagggaaaggtttgatctctcagtacctacttatatcaatagttgcccaataaaaaggtatgtttggaaagttcttccacaagaaatctttaatagtccacctcatgtcaatattttatactttagaaataatgtataagcagtttctttagtccataatttgccatatatagatgatatattgcaggttgactcagataacaatatcttaggaaaaatatttgatgaagtaaaaagaattttgccttgttgggaattacaaattgctcctgaaaaaaaaaaaatacaaagaaaagaatcttatctagactataaaatagatatagaaaaaaaaagttcaaccacagaaatagactgtcttagtcagggtttctattcctgcacaaacatcatgaccacaaagcagctggggaggaaagggtttattcagcttacacttccatactgctgattatcaccaaaggaagtcaggactggaactcaagcaggccaggaagcaggagctgattcagaggccatggagggatgttctttactggcttgcttcccctggctttctcagcctgctctcttatagaaccaagactactagctcagagatggtcccacccacaaggggcctttcccccttgatcactaattgagaaaatgccttacagctggatctcatggaggcatttcccaactgaagctcctttctctgtgataactccagctgtgtcaagttgacacaaaactagccagtacagagaccaattacaaattcttttttaaaatatgatttattgactttccatcccaatatcagattctcctcttcccagtatccccttctcatccccttctcatcccctcctcccttcctcctctgacaaggtgatggcccctgggtatcatcattctactacccatacatcagtcactacaggacggtgcatcctcttttattgaggccaaacaatgtgcatcctcttttactgaggccaaacaatgtggcaaaattaagggaatgggatacacaggcaggcaacaaatttagggacagcacccactccagttgcatgaagatcaagcgtgtggaaaccttacatccagtccatgcttgctctttgattagtggttcagtttttgggagttcaaaggttcatgttagttgacacactttttcttcctgtgaagactatcctcttctgatttgtcacttctccccccaactctgtcacaatacttctggagctctatctgatgtttggttgtgggtctctgcatctgtttcagtgtgctgttgagtgaagcctctcaaaggacacttatgctaggatcctgtctgcaagcataacaaagtatctatcacatctatctcagaaaatacaaatcagaagagcccaattaagaactcttaatggttttctaaacttgctgggagatattaattacttagagcatataattggattaattattcaagagctaggtgatttattttaaagcttacaaggagataaggccttgaatagttcaaaaaaattaatagctgaagttcacaaagaattggctctggtagaaaataacttacattaattttatatctagccaccttgctgaagttgtctatcaggtttaggagttctctggtggaatttttggggtcacaagtatactatcatatcatctgaaaatactgatattttgacttcttcctttccattttgtatccatttgagctctttttgttgtctaattgctctggctaggacttcaaggactatattgaataagtagagagagagagtgggcaactttgtctagtcctagattttagtggaattgcttcaagtttccatttagtttgatgttgggtactggtttgctgtatattgctcttactatgtttaggtgtgggccttggattcctgatctttccaagacctaaaatgaagggatgctgaattttgtcaaatgctttttcagcatctaatgaaatgatcatgtggttttttttcctttgagtttgtttatgtagtggattacgttgatgtgtttccatatatttgaaccatccctgcacccctggtatgaagcctaattgatcactgccaatgggacaaaacagcaaccaatggattgggaaaagatctttaccagtcctaaatccaatagagggctagtaatgaatatatacaaaaaattcaagaagttagtctccagtaaactaaacaaccctattaaaaatggggtacagagttaaacaaaaaattctcaactgaggaatgccaaatggctgagaagcacctaaagaattgttcaacatccttagtcatcagggaaatgcaaatcaaaacaaccctgagattcctcctcacatcagttagaatggctaagatcaaaaactcaggtgacagtagatgctggagaggatgtagagaaagaagaacactcctgcattgctggtgggattgcaagctggtacaagcactctggaaatcagcttggtgattcctcagaaaattggacatagtactatctgagaacccagatataacactactgggcatatacccagaagatgctccaacatgtaataagggcacatgtcccactatgttcatagcagccttatttataataaccagaagccagaaagaacccagatgtcctccaacagaggaatggatacagaaaatgtggtacatttatacaatggagtactacgcagctattaaaaacaatgaattcatgaaaatcttatgcaaaaggatggaactagaaaatatcatcctgagtgaggtaacccaatcacaaaagagcatacaaggtatgcactcactgataagtggatattagctgagaagctcagaatacccaagatacaattcacagaccacatgaagctcaagaagaaggaagaccaaagtgtggagatacagagacaaagggtggatcagaggctgaaggaaaggccatccagagactgccccacctggggatccatcccatatacagttaccaaacccagacccaagtgcttgctgacaggagcctgatacagctgtctcctgagaggttctgccagtgcctgacaaatacagaggtggatgctctcagccaaccaatggactgatcacaggatccccaattgaggaactagagaaaggactgaaggagctgaaggggtttgcagccacttaggaggaacaaaaacaaaaaccaaccagtgcacccagagctcccagggactaaactaccaaccaaagaggggagacccatggctccagctgcatatgtggcagaggatggcctagttggtcatcaatggaaggatagtcccttgatcctgtgaagccttgatttcccagtgtagggtaatgccaggacagggaagcaggactgggtaggttggtgtgcagggggaggggaatgtgatagggggttgttggaggggaaaccaggaaaggggataatatttgaaatgtaaataaataagatatctaaaaaaaaaaagatattgcaaggtgcacatgtagactgttaggatccagtgatggcttgtattttacttatattgtatatagttatattggcttatatttatttatatttagtttacttctattcattctcccacaaggactcttatgtagtgagaagataatggatatttttagcacatgaacaggtaaaaaattaaagacctgaattgattctaaaaggaaaaaatgggactttgacaattaacaggagtagacccatcagaaattgtcgtacctttactaatactgaaattgcctcgttatttgtataagatgaacgttggtaaaaagcttatggtaatttgggggagaaattaacagcaaataaccaagagtaaaagactgcaatttgtaaaagaaccaatttggattttccttcagacgacaaaatgaacaccaacctgaaaccccttcattctataatgttgcaggttaatcagaaaagtgagattatatgtcagaaaaaaacaagtaaagtgtctcagagcctgtgtgattcaattcaagaatcagagttgtactattaaattttcttggatcttttaataaggtcactgactcttaatgtgtggaaagagttgttttgcacatagaaagtgctaaacttattcagaatgattcagaattaacatcactatatattcaactacaacaagctgaaatagaagtcatctgatctgtataacatatatatatatgggatatgatatgatatatatatatatatcatcctgagtgaggcaacccaatcacatatcatatcatatcatatcatatcatatcatatcatatcccaacaaggaaggcctcaggcacaaggtaacgatgagatagaccatctcttaatacaaagggcagtaaaagtttcagaatttcataggaaacaccatgttaacagcaaaagtttgaagaaagatatttctatccattggcaacaaaacatgaaaattatatggaaatattgtatctgttctatgcaaactccattacctgcagggtataacccaaagggtatcctgaaaaataaaaataaaatctatcaaatggatgggctgtattttgcagagtttggaaaattgaagtatgtgcatcatagtatagatacatatccaggatttcaatgagctctaagttctgaaagaccaactctgaacttacttactagatgttatggctattatgagcatgcctgtacaaattaagactaacaatgctccagcatgtttcttcagtaaaatgaaaatgttatacttgtcctctcggatatcttgtcctttttatacaatgtaaagcacgttacagatataccacacaattctacaggacaaacagttgtaaaagtatataattatcctttaaaagagatggttagtatacagaaaagggtaacaaagacccccagagttatatcacatagtgctttattaactataaatattgtaaatgctaatgagcaaaacccaacagttattgagacacttaaatgtgaaaaaaaactgctgaattaaaccattcttatttttttttaaggatgtcttaacttcaaagtagaaggcaagaaatgtgctgtgttggtgggagggaggacttgcctttctttcaacagaagaaaaaaaaaagctgtagatttcatgataactaataaagattagatttgcctaaaggagacctcctgtaaagcttgtttgcagacatgaagaaagaaactaaggaaaacaccaaaataggtaacatgaatgctgataccgctacataggaacagctctaacactggctgagatatcagtgtctccagcctggacttcagctacacagagcaaatagatcttgttggctatagagtcctcaggaattttttattacatgtcatcttttcatgaggcatggttggaaatttatattagagtttggctatacattccaaatgtattataaagttttgattcatttcacttggccaaacatagagtagataattatctttagctgatttgtgcacattccatatgtattagtgcagtaatgtatagtgcctttaaaggtttatatggctacagagcaaaaggaccagacaccaaataagataagacaaatatcacaggtgatccagctgcacacattgccagaattatgtttcctcaaaaatctgcatctaggacaacttaaaaagactagctaagatactcaagacttacaaactgttccagccaggacttgagttaagcccttcactttcctgtcacatagagactggacagtaaatgatacagctagctttcctagtactaagccaatatcttaggtttcatagggcctccaaaagatgtcattgcccatatacagccagaagcaatcctagaaaatgactccccattctcaagagataggggtgagtgggttttggtcattcaatgtgtggtggatgattgtcattatttaaagggttgtcagtaacaatttattaatggtctcggtcacagaggaaagaaggcataaatactcagggatctgtttttcctctcctctatccctctttgtcttctatccagtgttaggagaaataaggggagaaatgatgaaaagaaaaaggggaaatgcagaaatgatagagtaaaacggtaaattactgactctacatttaaactgaagaatatcaacaagccaaatagttttacattggtttagattattataaattgatacaaattaaggttatattttgctacaacatactgcctatatgttttaactcttttctgaggtattgttcctatgcatctcatttaaaaatgtaatgtgacattctagtccttaaaatatgctactgaaaactgtttagagtaattaagaagtaaaaggtagccataaatctatcaaatctgtggtcatctaaggtactggtttagtttatttaagaaataagctttatttagtctcctgcagatgttttcaaagatgaacagataatagataactagaaacaagaaatatttccttattcagatatactctagattcacagatgatcttcagacacttcagagatctacataatgtggcatttaaagatgtcttattcataagatgcttttcatgacagggagacacaacagcttttggtggcatctccatattactttaatgaatattatggtcatccaagaacctccttatggagtatgcttcagatacagcaaagctagaaacttggaaaaacaaaaaacaaacaaacaaaccactgtccttggttcagttgtgaacagaatgctctcccagcaatgcacaatcagggcacaaagaatgtcaactgatgaactttgccaggacaaggtaggcacatctttcatagttcctgctttacagagaagtctgtcaaatacactggtccagaaggctgaagacagatactttatatttcaatgaaaacttgggtgactttccaggtttcaagcaacctctgtaatttctgtagttttgaaagcttcttgtcctgcactttcagtttattcaggtaatatttatccttctctaatatttattcttctcaggtgtctgatggggttgaagattagatagttataatctcaaaattgatcttaaagacatttataagttgataatgcaagttatgatggaaagtgattcagggacagaactttgaagtcatcaaaatagagatagtggatagagaatggagcactttatccaaaggtgactaatacaaatggactggacattgtgaatataattcttacctgatagttttcataatttttcttattgtatgtaattaatattagagaaagaaccttttttgaactaacaggggtagatattggagtaatgtcttatgcattgggtaaagattatctctttattaaacaaatactgatttctgaaccaacagtgatatgcttacaagccaggctttgggtattgttaataatcagtgatttgtaaatacttcctctctcagctttttattggtttaaatacaatgcttatggcctatagcaaaggcaagaaaggaaggtgggacagagaggaaatctgaaaagtgccagtccaacagagaggaggaggctagaccagtattagatactgagaggtagaaaccatgtggcaggcatagataatatgtatgggttaatataagttgtaaaagtaaaataaaaagggaagaagggagggagggaggagtaaccataaacaaaatctatacctcacacatgatactgaaaaatgaaattatgtaaacagtctgcaaatcccagcagacatggcaatgtgacagacattccacttatgaatgaggccaggaacaaataaataagaaacagcatccagagatgcattatgttcatatatacatatataagtatgaatgtgaatatttctgaatataatctgcttgttctgtataacttatttatttgtatgttttcaagcctgactatttgccactggataaccaattggtgtgcttagtgtgctcttccctgggaagatcacgtattccaatcccagtcttccttagtttcctcttgttctttgtgtaggcttaaaccactttagagtttttgtttgtttgtttgtttgtttgttttttctgatcgacaatggtgtggccattagtgtagtatgtgttcacttaatatttaggactttatgtgactatgggtgcatcttctgatattattaaaggagacaatcccttggaaaactccctaatctcttggctcttagagttgtattactccttcttcaacaatggtcctgagccttggatatgggactgctttgtagatatttcccacctaatagtaccaggtcttcgacaaataatttccaatgaggttagggtatatctaataaattaggccattctttttattaattattttatttacttacattttaaatattgtcccccttcttggtaagaaggccattctttactatctaacctctttatatcttcctaagaagaccattttttaattatttttatttttattttttgctaagcctcctttcaagaatcaacagttatccttctctgagccaagaagaaaattttccttatcacatgtccctaacctacctacagaaaagtcaaacaaagcagtgataatgtgagtctctggaaaggggaaagctacaggtgtgctcctgtagtagcagacggagccctccccttagtatctccttctccctgcactggggtataaaggcaagctttcccacagtgttcactgcctgctgtcacaatgagtacactcctgttcctggcccttgtgggagcagctggtaagttccatgatttaacttgggtcctgttctttcttatagaagctgtgaatcccaccactaaggatcatttttcgccctatcaaaactccaatgtcctctttcttcctccagcagtagtagctctgtctccagtctttcaagtttttctgtaaggttaaggtttattaccccttccttgctcatctaatatgtgatcagaaatgaaagcatatggttccaggaaatgaaccagcaggtcttctgcatgggtccaacagactggggataactcagcccaagtcatctgtacaagaggaatactcctaagttgaaagttgtactcttcattatactagaaattattatcttaaaattctaaccttaggagtctggaacaatgactttttattaggatgggcatttatgtatatatatataaaatcttcccttgtgaccctcaatgccagagtggtcactgtggctctgcctaggccctctgtacctgcaggtaattaatgttgcatatctctctctctctctctctctctctatatatatatatatatatatatatatatatatatgtatatatatatatataatacgtgtatatatatcatatatattatatattaaatattacaatgtattggatacataaacatgcaattaaacttaaaaaacaattatcttccagaataacatcacattcctctgtcctatgtaaagcctactctctctttgtccttaatatgcagatgaactataaagcttgtgggtacattaaaatctctatattttcaggatattttgaagatgcagttcaaactgcattaagctatttaagctctgtaagacacatcaatgaaagatcaagggaggtagtgaatcaaccatctctgcatcctattcctgcaagctgagaacatcacttgccctttccctggtaacccatcaaaatgtagtcacatacagagtactttgctactgtaaatttaagataataatgtccagcataatgagaattttaactttcaatttaggagtattcctctacagtctctctatgttgggcaaacatttattttttcctacagggatacagtgttaccttcttgccttctttcttgccttctattattgcactctttaaggatgcctagtcagaggcctgaaggagtcaccttccagcaccttcatgaattttctcctcaatgatcttttttttttaattgaagttgctttccctgtggatgatgatgacaagatagttggaggatacacctgccgagagaattctgttccctaccaggtgtccctgaactctggctaccacttctgtggaggttccctcatcaatgaccagtgggtggtgtctgcagctcactgctacaagtcgtaagtggtggtccctaatggtacagaattcaaatttggcctttctgcagacacagtataagatcaggcaagaactaaggttgtaaagtaaacagcagtagtcagaagggaaagattaccaactaaaacatttttatgagtttgggaagagtaagtatacagaataagaagccgttcacattcctaaacaatcaaaaataaattaatgatatacatattgaaggcaaggaaaattgactttaggataaaaagaaccaaattcgaagtcacaaaaagactatctcaaagactaatactgtgttctaaactcagagttttcagtgaatgtcaacagtctgtaagcgtactaaaacattatcttttgactaatttcaccatatagagagaagtcagagttagtttctataccagatagtatcagacctgaatacacatcagtttcagccagtttattgagaaagtctaggaaaagaacctagaaagtaaattcatagcaaattggaagtagcaaagctacatggatcaagactatcttatcccaaatttgactagacccatcagaataatagttcttaagaggaaaggatttaaggtggtttacattttgcaaagagacaggacaaatgaagaaacaagaaagtatgtgtatgcaaaggggggagatgtagttttgaggagattcccacagcagtctttcatgccaatcatattttgctcccccccccccccaccttttgaagcagagagtaattgggtttcacaattgtagttgcacatcacaactctacttctgttatattaggcaagtcctcttccccattccagatatattcagcaaaaagagttcgatgactcggagctacttggggttaatggagaggaagatcctcatacacttctcttcccaacagccgcatccaagtgagactgggagagcacaacatcaacgtcctggagggcaatgagcagtttatcgatgctgccaacatcatcaagcatcctaaattcaaaaagaagactctggacaatgacatcatgctgatcaagctgtcttctcctgtgaccctcaatgccagagtggccactgtggctctgcccagctcctgtgcagctgctggcactcagtgcctcatctctggctggggcaacaccttgagctctggcggtgagtaggctactttgttggcttcctttacaactttccagaaccattcaggtttctactcttaagtcactggattctaagatgaaaatacattgcaagtacactgagatgtgcagtgggtattagagagagttgcacacaaaatgaccttgatcacagaatgtaaacagaacagatgaaaaaattctattattacttccataaatgatatcaataatcactattttggaatccatgtttcttgctgggccttaatatgtagaataacgcccagttatcaaaaacagttcgggctggtgagatggctcagtgggtaagagtacccgactgctcttccaaaggtcctgagttcaaatcccagcaaccacatggtggctcacaaccatctgtaacaagatctgactccctcttctggagtgtctgaagacagctacagtgtacttacatataataaataaataaatcttaaaaaaaaaaaaaaaaagagttcaccactggcatgttgatggctattctgcactgaatcactttccttcttatcttttcctcaaagtgaacaacccagacctgctccagtgcctggatgctccactgctgcctcaggctgactgtgaggcctcctatcctggaaagatcaccaagaacatgatctgtgttggcttcctggagggaggcaaagattcctgccaggtaattggcttcactctcacaaatataatttgttttcctaggattggggttagcaggcccaagtgtatgaggcaggaagtttcctgtagtgaatccatggaaaagtgaggagggctattctggaggttatttcaacatgtcagccagaacagaggatggactaaccaagggaggcaaagcatggctagaatggcatcttcaggtcagagtaatgtgatcctttttccttgtgcctcttccttcaatactgtatttctcccttccagggtgactctggtggccctgtggtctgcaatggacagctccagggcattgtttcttggggctatggctgtgcccagaaggacaaccctggtgtgtacaccaaggtctgcaactatgtggactggattcaaaacaccattgctgcaaactaagcatcctaatccctatgaagtcactatgccaataaactgaattttttcttactttctgagtctctgtctgatctcttgcttttttcaatgggaaatatatcttatttgaagtcatttttctttaccattgatatgtgacaagcatcctacagctccatatatgttgaatggaatagtatttcagtagtagctgaaacgacaaaagcaattagaagaaaaacatagtagaacattcatgctaaaaatgttcttaataatcatttatgtttacatgtgattttttttttttactgagcactttcataaaccaaaattttgttcaggaataaataacatattttaaattggaaaatcttgaatgaaagttttctttacaagttaatgtgattcataggcaccatggctggatgtgattgtttgttgcctccctcctttggaggcttgcatagcaccttctggtattatagaagccaatcctaaaaaagaaggcattcaaatcagatcagctcaggggcctctgggtcctgtgccttaaattcatggtgtgttcaacaaaagggacttaccttccatctctctgggtaaaagaagtgtaataagcaatagcccatagtgtttctgcagtctttttgaaaaccctgagaatatctcaaaacaggacttttcaaaggcagggtcattgtcattttgttagatggtctttggctcttgaagggtgtattgctagtaccagataggagccttcagtgatagatagtatgtgtcatcttccaattggtttctaggttaagatcttttacaatgttccattcattgacctgaaatgttgatgatctcattttttttcaataaaataatcttccacatatatgtaccacatttcattatatactcatttgtttgaaaggtgtttagattgtttcaatttcctagctaagatgactaacctggcagtaacctgtcactctgtacttgaagtacttaacctcccaacaaaagggaaagtatgactgatactatattcctgatcaggactatttaaataattctataatccctaaggaaatggaagcagacattaaaagtctctccattagcctcccacaaaagcccagggccagatggttttagtgcaaatttctactagactttcaaagaagagctaatatcaatactcctgaaactattccatgtaacagaaactgaaagaacatttccgaaatcattctatgagattagtcaccagggttcttaaacaacacaaagaatcaagaaagtagcaagacacaaaattaaattgaagaaatctgtagccctcctttatatacatgataagcagtctgaaaaaaaaacttagggatataatatcttttatcataggcacaaataatataaaatacatgtgtataattataaccaagcaaactaaagacctatatgacaagaacttcaactctctcaagaaagaaactgaagaagatatcagaagatgttcatgggtccctaggattaatatagtgaaaatagccatattaccaaaagcaatctacagattcaatgaaattccctgcaaaattccaacacatttcttttcatgaattgtgttctcactttcatgtggaaaaaaacagaccaataatagctaaaacaatcttgaatactaaaagaaattctagaggcatcactatccctgactctaagctgttgtacatggtaatagcaataaatactgcatagtattggtacagaaacagacaggtaggtcaatggaattgaaacatcttgcttcttcactggtcttcacttcatagagagaaactcaccaaaaaatttcttgtgatcttttggctcattctggccccttccactgatttgtgcctattccctggagcattgctgctactcctggatcatgtgaccactacttattcatgttgcatgtttgctattgaactggagtgctggtattataacaaggaagggtagaatagcccaaagaacttatatatatatatatattattacgtattttcctcaatttcatttccaatgcgatcccaaaagtcccccataccctcccccccacttccctacccacccattcccatttttttttgttttggccctggcattcccctgtactggggcatataaagtttgcatggccaatgggcctctctttccagtgatggccgactaggccatcttttgatacatatgcagctagagtaaagagctccggggtaccatctagagactgccatatccagggatccatcccataatcagcttaaaaacgctgacaccattgcatacactagcaagattttgctaaaaggacccagatatagctgtctcttgtgagactttgccggggcctaacaaacacaaaagtggatgctcacagtcagctattggtggagctagagaaagtaccaaaggagctaaagggatccgcaaccctataggtggaacaacattatgaactaactagtaccccaaagaacttctaaataggcccacatcactcttttcctattaaccctctatctcctttacctctagacaatgggcaattgaaacatttaagaacactaaataaagagatttttgaaaatttcaaacctacagacaagcatggtagatactcagttataagtggacattagttataaaccatgtttcagaatgtagaacaaaatatatattagcagtgggtggaggaaaggaattagatggaagagatgatggggacactagtaagacagtggggagattaaatgtagggcactcaattgagagataatgaaaattgtcagtgagtggtgatcctactggggtctccaaataacgagggaaacagagtcccactggccttctaatgttaccaaatgaagttttcaggaccaggactattttatatgcagtggagttgttggccaaaagtgtccatggaaattcccatacaattcatgtaattgccagcataacatgttgctctctgcaaacaggtaggagggttccattgttgaaggcaacacccacacaattcactgaatatggtgtctacatagaactttcacctagtcttcactgatgatgctcttgtatttgttagccttgctttcttctctaatgttcacttatagtgattttatagagaaaatgcaccaaagaatttctggtggtgttctggctgcttcttgtaattcagtggatccatgctgcttggtggagccttgtgacttcttctggtcaagccactgctgcttattgatacttggtgttttgctagtggaatggactgctcacaattaagattggaatcacccaaaataactgctttaaacaggtacatgttccccatgtaagattagccatctgcctcccctactgctttgtctctgggctactaggaagttgaagcatttatgagcccttactaaagtagattttgaaaaatataaatttacaacatctttagaagatttggagggtctttgatttataacgtttagtcatagtttattttttttaatcttacatgtcctttgcatataattatgacttccagttctgtgttcttgtgttcttatgagattccagtgtacatgaacttatgcttctccgagtctttgtgtgtctattgtgcttttttatttgctctttttcttctgttactttgtacttttctactttgtttttatttattttattataatcctcagatgcctctttattttgtaacaggagcttgaaagggagtaagttttactggggggaataagtaacatcttggatgagttgaggaagagatattataatgcaaatttattcaatgaaaaaatgtggcacaggtgagagtgtggagtacagaagctaacaggttctgggacaggcagaagacaaagagcttctgaggcagacctcttttcaggctccagatatccaggcttcttccctgccagaggagaggtgtccaccccacccgggagggctttgccacagcatctggtggagccatcttagttcccagattccactgagactagtctgtgcggataagagtgtggactacataagctacacagattctgggacaagtcctgtttcgtatcttcatcttctgccaggaggcaggtccgaatgccaaatatctgtccaccttccctgcaagaggagagcttgcctgcagagagtgctctaaccactgaaactccttccagatctaatctcccaggtctgctgatagaggctaacagaatcacctgaggaaaaagctctaaccagagacaactataacaactaactccagagattaccagatggataaaggcaaacgtaagaatcttactaacagaaatcaagaccattcaccatcatcagaacccagcactcccacatcagccagtcctggccacccaacacacctgaaaagctagacctagatttaaaagcacatctcataatgaaggtagaggacatcaagaaggaatttaataactcacttaaagaaatacgggagaacactgttaaagagttacaggtctttaaagaaaaacaggaaaacacaaaaaacaggtagaagtccgtaaagaaaaacagaaaaacacatccaaacaggtgatggaaatgaacaaaaccatagtagacttaatagggaagtagacacaataaagaaaacccaaagtgaggcaacactggagatagaaacctaggaaaaaatcagggaatcatagatgcaagcatcagcaagagaatacaagagatggaagagagaatctcaggtgcagaagattccatagagaacatctgcacaacaatcaaagaaaatgcaaaatgcaaaaagatcctaactcaaaacatccaggaaatccaggacacaatgagaagaccaaacctacggattataggagtagatgagaatgaggattttcaacttaaagggccagcaaatatcctcaacaaaattataaaagaaaacttcccaaccctaaagaaagagatgcccatgaacctagaggaagcctacagaactccaaatatcctggacctgaaagaaattcctcctgacacataataatcacaacaacaaatgcactaaataaagatagaatattaaaagcagtaaggggaaaagggtcaagtaacatataaaagcaagcctatcagaattacaccagacttttcaccagagactatgaaagctggaagatcctggacagaggttatacagacactaagagaacacaaatgccgaaccaggttactatacccagccaacctctcaattaccatagatggagaaaccaaagtattccatgacaaaaccaaattcatacattatctttccacaaatccagcccttcaaaagacaataacaaaacaacaacaacaacaacaacaacaacaacaacaacaaaaatacaagcacagaaaccatgtcctagataaagcaagaaagtaatccttcaacaaacctaaaagaagacagccacaagatcagaatgccaactctaacaacaacaaaaaataggaagccacaattacttttccttactatctcgcaatatcaatggactcaattccccccccaaaaaacacatagactaacaggctggttacacaaacaggacccaaccttttgctgcttacaagaaacccatctcagggtaaaagacagacactacctcagaatgaaaggttggaaaacaattttccaagcaaatggtctgaagaaacaagctggagtagccattctaatatcaaataaaatcaacttccaggcacagtcttcggctccagacaaccagccaccttcctggtgagagcacaggggtccgcccggcccgagaattttctgcctcaggctccggcgggagccaccttggttccgggactccacggagggcaggctgcacggctgaggatgtggaatacagaggccagcagtttctgggtcagacgagagccacagagcttctgaggcagcgccatcttcggctccagacaaccggccaccttcctggtcaaagcaacacagcttctgggaaagatcttgttttgggccttcatcttcagccagggggaggtccaaacatcagataactgtgcaccttccctgaaagaggagagcttgcctgcagagactgctctgaccactgaaactcagaggagagagctagtctcccatgtctgctgatagagggtaacaaaatcaccagaggaacaatctctaaacaaagacaactataacaactaactccagagattgccagatggcgaagggtaaaagtaagaatcctactaacagaaaccaggaccactcaccatcatcagaacccagaacgcccacttcgcccagtccagggcaccctgacacacctgaaaaggtagacctggatttaaaagcgtatctcatgatgatgttagacgacataaaaaaggaatttaataactcacttaaagaaatacaggagaacactgctaaagagttacaagtccttaaagaaaaacaggaaaacacaaccaaacaggtagaagtccttatagaaaaacaggaaaacacatccaaacaggtgatggaaatggacaaaaccgtactagacctaaaaagggaagtagacacaatagagaaaacccaaagtgaggcaatgctggagatagaaaacctaggaaagaaatctggaaccatagatgccagcatcagcaacagaatacaagagatggaagagagaatctcaggtgcagaagattccatagagaacatctgcacaacaatcaaagaaaatgcaaaatgcaaaaagatcctaactcaaaacatccaggaaatccaggacacaatgagaagaccaaacctacagataataggagtggatgagaatgaagattttcaactcaaaggaccagcaaacatcttcaacaaaattattgaagaaaacttcccaaatctaaaaaaagagatgcccatgaacatacaagaagcctacagaactccaaatagactggaccagaaaagaaattcctcctgacacataataatcagaacatcaaatgcactaaataaagatagaatactaaaagcagcaagggaaaaaggtcaagtaacatataaaggcaagcctatcagaattacaccagatttttcaccagagactatgaaagccagaagagcctggacagatgttatacagacagtaagagaacacaaattccagcccaggctactatacccagccaacctctcaattaccatagatggagaaaccaaagtattccacgacaaaactaaattcacccattatctctccacgaatccagcccttcaaaggataataacagaaaaaaaacaatacaaggacgggaaccacgccctagaaaaaacaagaagataatccctcaacaaacctaaaagaagaaagccacaagaacagaatgccaactttaacaacaaaaataacaggaagcaacaattacttttccttaatatctcttaatatcaatggactcaactccccaatgaaaagacatagactaacaaactggctacacaaacaagacccaaaattttgctgcttacaggaaactcatctcagagaaaaagatagacactgcctcagaatgaaaggctggaaaacaattttccaagcaaatggtatgaagaaacaagctggagtagccattctaacatctaacaaaattgacttccaacccaaaataataaaaaaagacaaggaggggcacttcatactcatcaaagataaaatcctccaagaggaactctcaattctgaatatctatgctccgaatacaagggcagccacattcattaaaaaaactttagtaaaactcaaagcacacattgtacctcacacaataatattgggagacttcaacacaccacttccaccaatggacaaatcatggaaacagaaactaaacaggaacacagtgaaactaacagaagtgatgaaacaaatggacttaacagatatctacagaacattttatcctaaaacaaaaggatataccttcttctcagcacctcatggtaccttctctaaaattgaccacataattggtcacaaaatgagcctcaacatatacaaaaatattgaaattttcccatgcatcctatcagatcaccatggactaaggctgatcttcaataacaaaataaataatagaaagccaacattcacatggaaactgaacaacactcttctcaatgataccttggtcattaaaggaataaagaaagaaattaaggacttttcggagtttaatgaaaatgaagccacaaaattcccaaacttatgggacacaatgaaagcattcctaacaagaaaactcatagctctgagtgcctccaaaaataaactagagagagcacacgttagcagcttgacaacacacctaaaaggtctagaagaaaaggaagcaaattcacccaagaggagtagaaggcaggaaataatcaaactcaggggtgaaatcaaacaagtggaaacaagaagaactattcaaagaatcaaccaatctaggagccggttctttgagaaaatcaacaagatagataaacccttagccagacacacaggagggcacagggaaagcatcctaattaacaaaatcagaaatgaaaagggagacataacagattctgaagaaatccaaaacaccatcagatccttctacaaaaggctatactcaacaaaactggaaaacctggatgaaatggacaagtttctagacagataccaggtaccaaagctaaatcaagatcaggttaatgatttcaatagtcttatatcccctaaagaaatagaaacagtcattaatagtctcccagccaaaaaaaaaaagcccaagaccagacgggtttagtgcagaattctatcagaacttaaaaaagacctaattccagttcttcacaaactattccacaaaatagaaacagaaggtactctaccaaactcattctatgaagccacaattactctgatacctaaaccacaaaaagacccaaaaaagatagagaacttcaggccaatttcccttatgaatatcaatgcaaaaatcctcaataaagttcttgctaacggaatccaagaacacatcaaaacaatcatccatcctgaacaagtaggtttcatcccagggatgcaggtatggttcaatatacggaaatccatcaatgtaatccagtatacaaacaaactcaaagacaaaaaccacatgatcatctcgttagatgctgagaaagcatttgacaaaatccaatacccattcatgataaaaagtcttggaaagatcaggaattcaaggcccatacctaaacatgataaaaggaatctacagcaaagcaatagccaacatcaatgtaaatggtgagaagctggaagcaatcccactaaaatcaggcactagacaaggctgtccactctcgccctacctattcaactttgtacttgaagtcctagccagagcccccaatggagaaactagagaaagcacccaaggagctaaagggaactgcaaccctataggtggaacaacaatatgaactaaccagtacctgggagctcttgtctttagctgcatatgtatcaaaagatggcctagttggtcatcactgcaaagagaggcccattggacttgaaaactttatatgccccagtacaagggaacgccagagccaaaaagggggagtgggtgggtaggggattgggggggtgggtatgggggacctttgggctagcattgaaaatgtaaatgaggaaaatatttaattaaaaaaaaagatcaagtatcgataaatgggacctcataaaattgcaaaccttctgcaaagcaaaagacaccgtcaataagacaaaaaggccaccaacagatttggaaaggatctttacctatcccaaatcggataggggactaatatccaatatatataaagaactcaagaaggtggactccagaaaatcaaataaccccattaaaaaatggggctcagagctggacaaaaatttctcacctgaggaatactgaatggcagagaagcacctgaaaaaatgttcaacatccttaatcatcagggaaatacaaatcaaaacaaccctgagattccacctcacaccagtcagaatggctaagatcaaaaattcaggtgacagcagatgctggcaaggatgtggagaaagaggaacactcctccattgttggtgggattgcaggcttgtacaaacactctggaaatccgtctggcggttcctcagaaaattggacatagtactaccggaggatccagcaatacctctcttgggcatatatccagaagatgccccaactaataaggacacatgctccactatgttcatagcagccttatttataatagccagaagctggaaagaacccagatgcccctcaacagaggaatggatacagaaaatgtggtacatctacacaatggagtactactcagctattaaaaagaatgaatttatgaaattcctagccaaatggatggacctggagggcatcatcctgagtgaggtaacacattcacaaagaaactcacacaatatgtactcactgataagtggatattagcccaaaacctaggatacccaagatataagatacaatttcctaaacacatgaaactcaagaaaaatgaagactgaagtgtggaccctatgcccctccttagaagtgggaacaaaacacccttggaaggagttacagagacaaagtttggagctgagatgaaaggatggaccatgtagagactgccatatccagggatccaccccataatcagcatccaaacgctgacaccattgcatatactagcaagattttatcgaaaggacccagatgtagctgtctcttgtgagactagaccagggcctagcaaacacagaagtggatgctcacagtcagctaatggatggatcacagggctcccaatggaggagctagagaaagtacccaaggagctaaagggatctgcaaccctataggtggatcaacattatgaactaaccagtaccctggagctcttgactctagctgcatatgtatcaaaagatggcctagttggccatcactggaaagagaggcccattggacacgcaaactttacatgccccagtacaggggaacgccaggtccaaaaagggggagtgggtgggtaggggattgggggtgggtgggtatgggggacttttggtatagcattggaaatataaatgacctaatacctaataaaaaatggaaaaaaaaagaaaatgtaaacgaaaaaaatacctagtaaaaataaaattaaataaaataaatcgacttccaacccaaagatatcaaaaaagacaaggaggggcacttcatactcatcaaaggtaaaatcttccaagaggaactctcacttctaaatctctatgctccaaatgcaagggcagccacattcattaaaaagactatagtaaagatcaaagcacacattgcacctcacacaataatagtgggagacttcaacacaacactttcatcaatggacagatcatggaaacagaaactaaacagggacaccatgaaactaacagaagttatgaaacaaatagatttaacagatatctacagaacattttatcctaaaacaaaaggatataccttattctcagcacctcatggtaccttctccaaaattgaccatataattggtcagaaaagaggcctcaacagatacaaaaatattgaaattgtcccatgcatcctatcagatcaccatggactaaggactaataataacataaataatagaaagccaacattcatgtgtaaactgaacaacactcttctcaatgataccttggtcaagggaggaataaagaaagaaattaaggactttttagagtttaatgaaaatgaagccacaacatacccaaacttatgggacaaaatgaaagcacttctaagaggataactcatagcactgagtgcctccaaaaagaaactagaaactagagagagcacatactagcaacttgatagcacacctaaaagccctagaatgggaagcaaattctcctaagaggattagattgcaggaaataatcaaacacaggggcgaaatcaaccaagtcgaaacaagaactattcaaagaatcaaccaaacgaggagctggttctttgagaaaatcaacaagatagataaacccttagccagatccactagagtgcacaggaagagcatcctatttaacaaaatcaaaaatgaaaagggagacataacaacagatcctgaagaaatccaaaacaccatcagatccttctacaaaagtctatactcaacaaaactggaagacctggatgaaatggacaaatttctagacagatatcaggtaccaaagttaaatcaggatcaggttaatgatctaaaaagtcctatatcccttaaagaaatagaagcagtcattaatagtctcccaagcaaaaaaagcccatgaccagacaggtttagtgcagagttctatcagacattcaaagaagatctaattccagttcttcacaaactattccacaaaatagaaacagaaggtactctacccaactcattctatgaagccacaattactctgatagctaaaccacaaaaagacccaacaaagattgagaacttcagaccaatttcccttatgaatattgatgcaaaaatactcaataaaattcttgctaactgaacttgtataaccactctggaaatcagtctggtggttcctcagaaaattggatatagtactactggaggagcctgcaatacctcttctgggcatatatccagaagatgttccaactagtaagaaagatacatgctccactatgttcatagcagacttatttataatagccagaagctggaaagaacccagatgccccttaacagaggaatggataaaaaaatgtagtacatttacacaatggagtactactcagctattaaaaagaatgaatttatgaaattcctaagtaaatggttggacctggagggcatcatcctgagtgagttacccaaatcacaaaagaactcaaatgatatatactcactgataagtggatattagaccaggaacttagaatatccaagatttaatatacaatttgcgaaaaacatgaaactcagaagaacgaagaccaaagtgtggacactttgccccttcttagaattgggaacaaaacaccaatggaaggagttacagagacaaagtttggagcagagacaaaaggatggaccatctagagaaagctatatccagggatccatcccataatcagcctccaaaagctaacaccattgcatacactagcaagattttgctgaaaggaccctgatatagatgtctcttgtcaaactatgccggggcctagcaaacacagaagtggatgctcacagtcagctagtggatggatcacaggacccccaatggaggagctagaggaagtacccaaggagctaaagggaactgcaaccctataggcggaacaataatatgaactaatcagtaccctggagctcttgactctagctgcatatgtatccaaatatggcctagacagccatcactggaaagagaggcccattggacttgcaaactttatatgccccagtacaggggaatgccagggcacaaaagtgggagtgggtgggtaggggagtggggggagagaatggcggacttttgggatagcattggaactgtaaacaaggaaaatacctaataaaaaattaattcaaaaaaataaaaaataaaaataaataaaaagaatgaatttatgaaagtcctaggcaaatggatggacctggagggtatcatcctgagtgaggtaacccaatcacaaaagaagtcacatgatatgtactcactgataagtggatattagctgagaaacttagaatacccaagatataaaatacaatttgcaaaacacatgaaactcaagaagaatgaagaccaaagtgtggacactttgccctttttagaactgggaacaaaacacccatggaaggagttacagagataaagtttggagctgagacgaaaggatggaccatctagagaatgacatacccggggatcttcccacaatcagcctccaaacgctgacaccattgcatacactagcaagattttgctgaaaggaccctgatatagtctcctgtggggctatgcaggggcctaggaaacacagaagtagatgctcacagtcagctattggatggatcacagggccgccaatgaagaagctagagaaagtacccaaggagctaaaggggtctgcaaccctataggtggaaccacaatatgaactaaccagtacctcctgagctcgtgtatgtagctgcatctgtatcagaagatggccttgtcagccatcagtgcaaagagaggcccattggtcttgcaaaactatatatgcctcagtacaggggaacgtcagggccaagaagtgggagtgggtggttaggggagtggggggagggtatgggggacttttgtgataacattggaaatgtaagtgaaaaaaataccaaattaaaataagaaaatgtatttaaagaaatgaaagtagaaatatatataaatgtcttaaagtgaactgctactccaacaatgacaaaagaagagaatatagtaaataaaagttttggcatagaatattgaaaaattgcaaatgaacagtataaaagggagacacacagaaatgaagttatgtgaagttgagtacagcctttctaggtctataaagaactgtggtagaatattgcattgactctgtaggttgattttggtaagatggccacttttactatgctaatcctaccaatccatgagcatagagcatcttgtcattttctgaaaccttctttcaatttctttcttcaaagatcaggcattaagaacaaaattttaaaaaaataggttcttacaaaacggaataccaagcaaagctaatctttctttctctagttgtttctaattgttgttcttgttatggtggttgtggttgctgtcttattttgattgaattggtttggtttgtgctgggttggtttgggttgggttagtttggtttagtttggtttggttccattggtttgttttgtttgttttgttttgttttgttttgttttgttttttgtcagaatggtataccccatatattcaaatgaaattaaaacaagtattcccatagtcatctggatacagccctaaacaaattagctgatatataaatctttgggggcaattttctctttgttattgaaaaagttgtttttcacaaaatatattgattgaatatacatggtcttcattttcctaaacaaacaaatttgtggttttttttttcactatttaaaccagggaaattacaaaagaacccagactattgccaagaatctacattactctttctgaatcaatagaaagtcatcattgctgaggaaaaatacacaaaactcatagaaaactggagaaattgagcagttacctacatagagcctttgttcctaagtcctagcttccttgcacagggaggtacaattcccactaccaaaaacaaacaaacaaacaaaaccaacaaagaaaccaatccattcagaaatccttcaatcttcattgatgttctgcaaatatgctagagctggtagctttaacagttgtctttggtctattctctcttcacatgctgctgttatacataactttattttgagacataagaagctcttcagaaccttaagtgaagatacatatgaactcaaatggaagatagccttaaagccaaggggctaagaatatcaggcagaaacaaatatgctgaagaaaatttcactttattggtatggtgactgcagagggaatgggaatttctagttggcagcaattgtgtcctgaatccagtccacatagttgcagaccttggtgtacacaccaggattgtctggcagggcacagccatagccccaggagactataccctggagttctctattgcagaccacagggccaccggagtcaccctgagaaagaggaacacagtctattagtaagggcatgtgtaatacgattgcatatagtaaactcaattcctgtttattctcatgtttccatttgtttatctccagagcccatctgctatccacactaatgtgttgaaatctaaaggagattcccttattcttcattcaccataacaccacagcacactttctgtctcacaccactaggctttgaagctcaactcccagaactgaggtctgcataagtggagagtggcaatcacctggcaggaatccttgcctccctctaggaagccagcacagaccatgttaccagtgatcttcccaggataggaggcttcacagtcagcctgaggcagcagtggggcatccaggcactggagcaggtctggttcactgactgtgaggaatggaaaagaatgaagacttctgtatccaatgttgaaccagctggcaagcaagactgtttcctgtgaccttaagttccactaagaaagaagggctttgagattcaatcatattcactgctgatatccttcttgaaaaaataatagtacattctacatgtgcctgaacagactctctggatcaggtcatttgttttgcaaatttctcttggatctcttgcaggagctaaatgtactgtgcacctaaaatatatttaccatttagaagccaggggcataatttcaggaaaggagttggttacagagtatataaaaatacagagagagagggggagagagacaaggggagacagggagagagaggaaagagaaagaaagggagggagaaagggagggaggaagaaagggagggagtgagggagggagagagagagagagagagagagagagagagagagagaagagagagaagggtagtaggtgacatgataggtcctacttaccaccaaagctaagagtgttgccccagccagagatgagacactgagtgccagcaggtgcacaggagctgggcagagccacagtggccactctggcattgagggtcacaggggaagagagcttgagcaacataatgtcgttgttcagtgtcttcctattgaagttggggtgcttgatgatcttggcagcattgacaaactgctcattgccctccaggacgttgatgttgtgctcccccaatctcacttggatgcggctgttgggaagagaaaaatgccacaatctttttctctatgactcaagacatcaaaattttctcaagcctctaaactcttttgtgactgtgaaaatttcaccatggggaaaaaatatggatactggaaagttttgtttgtctcagtctacattcttttttaagaaagattgagtgatggtgtacaggtgacaaaataaggattgcatgtagactgccctttattctaatgtactaacgccaaataggaataagacacaaagaggctatttgaaactctttccatccactgtttcattattcagtacacacagaatctatgtgttgcagggtatttgatcacaatgtgaatcccgaaattgggttaaacatgggaaaaacctgtctctagtcatggtgtgctcatccctaacacacaccttcaatctctgagttttctgtttattgtaatcataattaaataaagttaaacataggtcaagtggaagaataagcaacctgttgacagggagtgaacataaggggaaaaaagcagagagtaagacagagtcaggagaaccaatagagatacacacaggaagtagaagggagggacctagagtttgaaggggttttgagatggtatttagaatgagaacttctttagagatgttgattgtgaagcaaggtcagctgggtgctttttcttcctctctgatatgtcaggctttcatgccagcatctggctccagagacttctttggtaaagttaaacaattgagatttttatttaaaaacaggttttaatgctcatttgttttggaaatgagagctgcactgttaaatttcaaaaacaagggtcaatatgtgaacttatttcaaaaacaaaaacatttaaatttcaaaaacaagggtcaagagttcacacatatgagaccatgtgggaaaaaaaatgagaccatgtgagaggctcattctcttgatcacaacttcaaacctaatgactcacaatcaagaatctaggactgaacagtccatgtcttaataattttttttaatatttttcaaccatgcacagtctgagagaccatttgggagacattattactcatcccataatagaatataaaaacaacaggtgaagaaaataaaggataaagctatcttcagctataatttgaaaactctgatgcaattgattgctataagaaacaggtatggtgggcagtggtgaagcacacctttaatctcagcacttgggaggcagaagcaggcagatttctgagttccaggacagcctggtctacagagtgagttccagaacagccagggctacaaaaagaaattatgtctccaaaaaacaaatgaacaaacaagaaaagaaacaagtactagttgtgaacatctttgccagcctcccatttgtttatatatggagaaaattacccttgatttctttcaaggtatacttttctttctatttcatatttgtttgtttggtgtgtgtgcctgtgagtgtttgatggtgaaacctcctatcatttgtcagtgttcaatcaaaggctgtgaacataagcttctctcagaaccttctctccttcatgtgattcacttccccctccagctttaccacatgcccacacagatgtctggtataatactgtcccagtctagtggcactgttctcaggtaaccatcactcacgttttgtagcagtgagctgcagacaccacccactggtcattgatgagggagcctccacagaagtggtagccagagttcagggacacctggtaggggacagaattctcttggcaggtgtatcctccaacgatcttgtcatcatcatccacggggaaggcaactagagtggagatataaaggagaatcaaattcatcaagatgttgaagggtagattgctcaattccatatcaccctcctacttttttagtattattttttgagtagaacagcatcctcagtaggcaacataggatttgatgtgtgcctgagaaaaggaatagaggacaagtaacgagatgctagtgggcccaccactcttcagagtttcaggaaaaataaaagaattgacaaaagaatgcattaagtgggatccaatcacattgtagttgtccacaccattgtttgcttctctctacaattcatcaataacaatgcttttagaatcccagattagtggctgctgaggaaattgccttctggtctccatttcagcctctatcaacatttagccctgaattcaacattgagatgttatagtgtattgacagaaactggtgtaacataaaatttgagagattataaaagtggaaaataggattctggataagaaatatgaacatcagagagagctaaggtagcagagacaattgtgaaggaggaacccatgttttctaattaattagaaatctggaccatagaaggcatgaaactcaccagcagctcccacaagggccaggatcaggagtgcattcatggtggaagaaggtaatgaacactgaagggaagcagacctttatatcctcaaggagggagaagtctgcctctcaaggtgggggtgggatatcattgatattttctgaacaaacacagctgtattttccttctcctatcacttctttttggacttcaggtgtctagaaaagttttcttctcagggaaggtgggagggaggacaactgattcttgaaaggatgctagaatgagaaatgagaataatgggtagaaagtgcttttagtaactttgaagaaaatagtaattgtgaagaatgcccaattctggtagctattgggggctctttgaacaacaccaacaaaaagattctatcagtcattcctggaatttttactcagatcttagccactctatttaataaaatatagaagttgaggagctctacggaccagcacttaaatctcaatgatgctaagtaaggaggtatagagttcctgaaatgtgtggccttttcattcttatgctttctaagcagtctcttggggttcaaacatggatggcagagaatgtctaaaactgaaagaggaaatgtgtttctttgttgtataggagagaattaaatgaatacaaaggtcaagctctgcatccattataggatatttgactctcattctcatgttacatgatggatagccagtaactttgagagtatacaaactaaatactgcatataccataacaatcttaaggagtatcaaatatgatcagtgggcttttattaaaaataactaccctgtattctagatcaaataatctctgctagaagtcattactaagtttgaagaatagagtttgaacaatgttcaacctcacttcttttttttttattacatattttcctcaattacatttccaatgctatcccaaaagtctgccatatgctccccccccccacttccctacccacccattcccatttttttggccctggcgttcccctgtactggggcatataaagtttgcgtgtccaatgggcctctctttccagtgatggctgactaggccatcttttgttccatatgcagctagagtcaagagctccagggtactggatagttcataatgttgttccacctatagggttgcagatccctttagctccttgggtactttctctagctcctccattgagagccctctaatccatccactagctgactgtgagcatccacttctgtgtttgctaggccccgggcatagtctcacaagagacagctatatctgggttctatcagcaaattcttgctagtgtatgcaatggtgtcagcgtttggaagctgattatggggtggatccctggatatggcagtctctagatggtccatcctttcgtcacagctccaatctttgtctctgtaactccttccatgggtgttttgttcccaattttaaggaggggcatagtgtccacatttcagtcttcattcttcttgagtttcatgttcaacctcacttctgaacaaaaatcaggtacttgtagaaatggaagaattagggatattcatcagtggtgaatcttcttgtatgaaatcctggcttttttttgtttttcatttaaatcatccctaaggttcaggttccattttagtatagtacaaaccatctagaagtgcagtacctgcctgagggtcatttgtgcctatttataacactcaattggagaatcatttctatctgacgcttttatcttcattgaccccagatataggaaaaggtgcattggagatgagatcatctttgagttccttgaaaaattgtgatggttctggagctgtccgttaatgagagaagtttagataaaattgtggcaattggggaggcaaactgattggaggctgaagaaattggaaatcagaagaaactgcaaaaagaaaatgagcctcatgggacacttgatggtcatattactggcatgactatgtgagcttcacatctctgaacagtcgctcagagttcccatctctccatggtgtttttcatttacttgctcctgggatcattcctaaacggaaggtctgtcatattgtcatctctgtcaggtttttcagatggttaacatactttcatttttcacaatcatgttagagtgaggttcagaaaggattgatttttgatgggttcctctttacctgagaaattatctaaaactggcatgctgcctcaaggccataggaagatatggaaattattggagcatgtgggagtgggtgcaggtgacagctgaattc

SEQ ID NO: 59 - DNA, 1844 bp, Rattus norvegicus
ggatgtctgggaagtggatttctgctctgctcctgctgcaaataagtttctgctttaaatctgggaactgcggaaaggtgttggtatggccgatggaatatagtcactggatgaatataaagataatactggaggaacttgtacagaagggccatgaagtcactgttctgagaccttcagcttttgtctttcttgatcccaaggaaacttctgaccttaaatttgtaacttttcctacatctttcagtagtcatgacctggaaaatttttttacaaggtttgtgaatgtatggacttatgagttgccaagagacacatgtttgtcatattttctttatctacaagatacgattgatgaatattctgactactgtctgactgtttgtaaagaagcagtttcaaacaaacagttcatgacaaaactacaggaatccaaatttgatgtcgttttctcagatgccattggtccctgtggagagctgatagctgaactgctccagattccttttctgtacagtcttcgcttctctcctggctacacaattgaacagtacattggaggagttctattccctccctcctatgtacccatgattttttcaggattagctggccaaatgacattcatagagagggtacacaatatgatatgtatgctttattttgacttttggttccaaacatttagagagaagaaatgggatccattttacagcaaaactttaggaaggcccaccacattagctgagataatgggcaaagcagaaatgtggctcattagatcctactgggatttggagtttccccacccaatatcgccaaatgttgactacattggaggactccactgcaaacctgctaaacccttgcccaaggatattgaagacttcgtccagagctctggagagcatggtgtggtggtgttttctctggggtcaatggtcaggaacatgacagaagaaaaggccaacatcattgcatgggcccttgcccagattccacaaaaggttctttggagatttgacggcaaaaaaccacccaccttaggacccaataccagactctacaagtggcttccccaaaatgatcttcttggtcatccaaaaaccaaagcctttgtaacgcatggtggagccaatggcatctatgaggcgatccatcatggaatccctatgattggcattcccttatttgcagagcaacatgataacattgcccacatggtggccaaaggagcagctgtggaagtaaatttcaggacaatgtcaaagtcagatttgctcaatgcactggaggaagtcatagacaatcctttttataaaaagaatgctatgtggttgtcaaccattcaccatgaccagcctacgaagccactggacagagctgtcttctggattgagtttgtcatgcgccacaaaggggccaagcacctgagatcacttggacataaccttccctggtaccagtaccactctctggatgtgattggattcctactttcctgtgtggcagtcactgtagtccttgctctaaagtgctttttatttgtttatcgattctttgtaaagaaggaaaagaaaacaaagaatgagtagagctcaatgataatgcatcacatgaatgaaatttgttcatcattttaagttatgaaccaccttctaaaaactcattaataactttacagaagcatagcttctttgtaattttgtaccatgtaaaaagacatataattctgaggcttctgatatgtgaccaaagaatcccatcatttattttaattttcaaactattcaatgtaaaacaatttgcctgtgtagaaaaatatataaataaagattgaattc

SEQ ID NO: 60 - DNA, 1666 bp, Rattus norvegicus
aagcttctgtaaggcaaaggacactgtggttaggacaaaacggcaaccaacagattgggaaaagatctttaccaatcctacaacagatagaggccttatatccaaaatatacaaagaactcaagaagttagaccgcatagaccgcaggaaacaaataaccgtattaaaaaatggggttcagagctaaacaaagaattcacagctgaggaatgccgaatggctgagaaacacctaaagaaatgttcaacatctttagtcataagggaaatgcaaatcaaaacaaccctgagatttcacctcacaccagtgagaatggctaagatcaaaaactcaggggacaacagatgctggcgaggatgtggagaaagaggaacactcctccattgttggtgggattgcaaactggtacaatcattctggaaatcagtctggagaatcctcagaaaattggacattgaactgcctgaggatccagctatacctctcttgggcttatacccaaaaagatgccccaacatataaaaaagacacgtgctccactatgttcattgcagccttatttataatagccagaagctggaaagaacccagatgcccttcaacagaggaatggatacagaaaatgtggtacatctacacaatggaatattactcagctatcaaaaacaacgactttatgaaattcgtaggcaaatggttggaactggaaaacatcatcctgagtgagctaacccaaacacagaaagacatacatggtatgcactcattgataagtggctattagcccaaatgcttgaattaccctagatgcctagaacaaatgaaactcaagacggatgatcaaaatgtgaatgcttcactccttctttaaaaggggaacaagaatacccttggcagggaagagagaggcaaagattaaaacagagacatgaaggaacacccattcagagtctgccccacatgtggcccatacatatatagccacccaattagacaagatggatgaagcaaagaagtgcagaccgacaggagccggatgtagatcgctcctgagagacacagccagaatatagcaaatacagaggcgaatgccagcagcaaaccagtgaactgagaataggacccccgttgaaggaatcagagaaagaactggaagagcttgaaggggctcgagaccccatatgtacaacaatgccaagcaaccagagcttccagggaccaagaccctacccaaagactatacatggactgaccctggactctgacctcataggtagcaatgaatatcctagtaagagcaccagtggaaggggaagccctgggtcctgctaagactgaacccccagtgaactagactggtggggggagggcggcaatggggggagggttgggaggggaacacccataaggaaggggaggggggtgggggatgtttgcccggataccgggaaagggaataacactcgaaatgtatataagaaatactcaagttaataaaaaaaaataaatcaatcggagaaaaaaaacacgcagactttagcttcaaacccacatctttctgataactgtcttccctgattagcatcacaggttgctctcctctttgtatttccgtgctggccaaaccagaactcctcacttgacactttttctttctttccctctc

SEQ ID NO: 61 - DNA, 251364 bp, Mus musculus; identical to SEQ ID NO: 58

SEQ ID NO: 62 - DNA, 185548 bp, Mus musculus
aaatggaggactttaagttccaatgacaggccttgtctcaaaaaataaggtacagcgtaataaagaacgacacccatagtcttcctctgatctccacacatgcatgcacgtgagttcataccatgaccaaattccccacatgattgctattgctttcagtcatcaaatatcagttgattaactacaatctcaagtgtgccttcttgagttctttgtatattttggatattagccctctatgggacatagggttggtaaatatgttttcccaatctatgggttgccgttttgtcctattgacagttgtcccttgctgtacagaagcttttcaattttatgaggttccatttgtctactgttgctctcaaaacataagccattcctgttctctttagaagttttcccctgtgcccaagtatctgaggctcttctatactttctcttctattagattcagtgtatctggttttatgtgcaagtccttgaaccatttgtacttggactttgtacaaggggacagatctggatcaacttgtattcttctacatgcagactgccaattgaaccagcaccatttgttaatgctgtctttttttctgctgaatggtttaagatatactgtcaaagatcaagtgatcttaggtatgtgggttcatttttgagtcttcaattctattccattgatctacttgcctgtttctgtaccaatatcatgcagtttttatcactattgcttgaggtcagggatggtgattcccccagaaacccctttggaaatcagtcccatggttcctgagaaaattggaaatagttctacctgaagactcagctataccactcctgggcatatactcaaaaggtgctccaacatatagcaaggatacatgctctactatgttcatagcatccttacttataatagccagaagctggaaacaacccagatgtccttcaacagaagaatggatacagaaagtgtggtacataaacataatggagtactacccagagattaaaaacaatgacttcatgaaattggcaggcaaatggatggaactagaaactatcatcctgagtgaggaaatctagacacacacacacaaaaatccacacatggtatgtactcactaataagtggatgctaacccaaaagcttacaatgcctatgatacaacctacagaccacatggagtgtagaaggaaggatgctgcagagtagggagatgctggagccgtggggtaggagagtgtggatgggttgggagcactctcatacaggcaaaagggaggggagagggaagatatgggaggaggggtgacagagggataactgggaagtaggatatcatttgagatgtaaataaatggaatgattaataataataaaggaaaagaatagtcacttcttccaactctggtattccttacctcacacttttccacagctggctgctgcccacactcagagctgttacctgccacaatgccagctcgcagattctcactgtcccctgtcccctcctccatggagtaggtcttggagtggttcccacggtggtgagcagggctctgaccctgggccaggctgagctgcctgcgcagagcacggttttcctcctcaacttctcgaacacgcacttccaggctctcccgctcccgttggctggaggctgtgtaccggggactgtgggcttgggactccaggggagacagagacacaggtttcccatctagaggaggagagaccaaggaagtgttatcgtggaaaatttacctccaggaatcccagcattaccttcccatattcttaccacagtcctacagcttagcaggaaagcagatggagtgtgaatgacaagtcacagcatccacactgaaatgggaaaaaaagtgagaacagaatggcttatggcagtgataaaaaaatcaaaatactgtgtagagaaggacactcctaatactgttcctcattaaatgcaatgtactcctctccatatgacacatttgcaagtgaacatttttaacaaaaaaaaaaaatcacaaaacatgtatggataagggggaatggaaggttcctttgtgttggggagcttgagaatatagaagatctcaaaagcaaaagaggataatacagtggcattcttcttaggtgaattcctaaaccaccttgtaaaccctgttttgaaagcataacctcccaatggaagccctcctctgcctgtataatgtttcttctatgtttcaaggctgatcatttggttttcttttccttttttaatttttataatctgaaaaataccactacccaaagacaattagcatatctcattgtataaactcagtgcctaatgaatgctgattatttgtagttctagagacatgagacacacctgaagttgtctcttctattcctgttctcactctgctgacaccccaggttcaaggcagtgggtagatatctagaggcttccaccctataactctcatgactggagaatgaccaactccctagtctgctaaaatgaacttctgtttttctacaacccagatcctgccacctccacccccttggattctagacaagtctgagattccaagctgtcccaggaaggctcataaagcttgataatcaaagctggccatgaatcacatgccatgttcacctgtactgcccatgctgcccatgctgcccatgctgcattgcctcagcccagcgtatttgatgtcctttacagatatctactactttatttagccccaaatcattttagggttaactgcatactctactgctctagcaatgcaacaaacagggcttgctgaattctactactctgaactacaaataaaagattaagaaaaaaaatctccagatgacatgaaatcacaggtgaatcagaagtgcattgtaactgggctgattaattacaagcttccaccacagcttttgaagtcagcctccatatttccttccattgagtgaattaaacagctcaggactagggcttatctgacaagtgtgggtccatagcctcctttgatgcacctagccttgttgagtacccataaccccagcacttaggggatcaaaaattgagggtcatcctcagatacacagagggtttaaagctttgggatacaacaacaaaatgaaaaacaaaacaaaacaaaacaaactaaaccaggcaagtagctaaaatacttagtgaacatggagcctatagtagggtaaagaaagatgaacatctagttagtaagagaaggcagactcccaaggtatgtggtaactaacaggggttcttgctacacatagtgccttaattttccatcactattcccatagagacagggagaaaggcagtatgaaagttcacagagtgaatcggcagaaaataagctatccttgattccatacctggccatgaccccacataagggactgagctcaaagtctttgggccagagagggggagggccagttctcacatgaaagaaattaggaacataagcacaaaagtcaggaagctctgaagacacaagattctgaggaactgtggaaatgtagcaaagggggatagctgtttgctttaatgctctgagctttgaatctattctgtgaaacagggacaagaatggtaacatagcaataaggctgaaggcttgaataagaaatccaaacacaaagagctaggagctgcagatagaatttaaggtggtactaaaatggcagatgttctgagcataggactgtagtgtgcaagcaggtggccacatgccttggcttccgctgacataactttgacacagggcatctcccacttccttgcccatgtcctttgctatgtcaaagtgcaaacacaggaaaacacagggcaccagggcccattcccatcttctttcccctttcctcatagacccacaaacctgtttataaaatttacaagctttaattatgtacttatgaaaaatggcattcttgttgaatccatttctggccattactgggcccccatttggttctaactaaactcaatttgttatctgtaagacacaggggaaaaaaagtcaacgctttatgagaagaaatgacacctaaatgggaaataataatattgagcccagagcctggaatggaagatgtgacaatagtgggcaatgagtgtttatctaatctgttttgaggccacatcaccttgtacaagcccctgtacttttcaactacttacttctttgaaacggaaagaagctgggtgtgggggcacaaacctctaatgtcagccgatagacagacctctgagaatttgaagacagcttggtttatatattgagtattgagttctagaacagccagagaaacatagtgagaccgtgttaaagcaaaatgagagagagaaagagagagagagagagagagagagagagagaggagaagaggaggaggaggaagaggaagaggaggaggagggagggatgtacttgatagggatgtgaagaagggtccatgggaaatgtttatgacctctagagataatatttaaaatgctatagaaaaatacaaacctaatgtatgtcaaactacttgttatttaaataaaatgataatagttcaggttaaagaaaaagggagatacaatagcagttaccaggaaagcaaaggaagtggagcgcatagcattaagaataaataagctttaactatggcctcctatttagtaactaacagacttaataaaagtagcatttttttgggtgactcagtgtctccatatataattgctgagacaaagctgtggctatatgtacacattactcagcaatgagatgcaactgagattatgaaacgtctttctttcctgtttttccagccttattcctaaccttagccctgtactagtgtttgctgttgctcttcccccgacactttgttgtttcaatctacaatctatttatatacacagtgaatccttctatgacagtttgcatgtagggcaatgggctattcacagacagtctggtcaacagtcgagctgaggtacggaaccctgggtcctggtggtgataattcacctacatgggacggtaggtgttccctcatgtctcctggactcaaggctcctgtcgaagttaccgctcccaggagaagcgtgtggctagtagtcacttatacaatgtcccaagcttctgaccttcaggctagactcctcccagttacctagcaacaacaagataacagcctaccataaaaggggctgcttggccccatctctctgtctcttcattctcctcactctcttactctcctctcctctctctcaatctctctctctctctctctctaacatcttaatctagcctttcttacctctccttttcccccttttctacttttggctatggtctctcttccttttaccttctctctttccccctgcctttctataataaagctctaaaaccatagactgttctgttcatcaaggatcgctgagcttggacgatgggataggctttctcctaatgaaccatttctaatctcctgtgctgcagcctcggacaagacttaggactcttgtcttcgtaggaacctctctccctcagccctctctcccatatccctggggctgagggtgtcaccctggagaccctggtatcgggggttgcccttgtctaccccaccccttgagtggggtcagtggcttagatgcccacccggggtgaagtggaaaacgtctggcagcccttcaatgtctgcctgtccagagcataggaggaactctggagggacttgggctctcttccccctcttcttcccctgacaccccccatagggcccatatgtgcacatgtgttgatgtagttcagcccactttgagttaaaaatgccaaacaatacattattcaaaacctcagttgacaacctctttctgcttctcccagaagttctaaacaagcagaaatgtatcatcatttttgaatccctgaatccactagggatgaatgctttgaattaagaagcaaagcatctaaaattcagaacaaagaaagaaaattgaaaagcaatctctgtgtggtgtaatgacaagtattagggacaggtattaggacactgtccacaacatcctaagagataatctcaaccgatttatatgtgttgattatcccgcaatctctgtggaaggctggcatgccatatgctatgggatcagttacgtacttgctgcaggactcatttctagactgggccagatttggatgtgcctctggctcttctagtcagaccttgaacataggaaaatcctgcagtcagagccagacatgaagagagctatcctcctgtatatttctatgaacaacgaagacactacatcctaacatttatgaggcgagatatcaaatagatgtgcttatatcctagaagaattttatttacaaaaagtaagaaggaaccagatttgcagatcttttgtgtccaaggtctgtgggactttgtcctaaagcatcatattgatctccttggttaaacccatctctagaatccccttatttacatagcttcccacacacagatgttgtgaattaatgcttttcatcctcatttccatcacattggcagtttgatatgtacagaagtaagttcatcacctcaaggtcaaaaatgaatgctgtgcaatcagaggctcctcaacacccacataaaagccacttatgaccagaaatgcctgtaattccagcactgtggatgggggttcgggacaaacaaaggcaagaggaacactggggcttgctggccatccagcctagctgaaaaatggtgagttcagggttcactgaagggatgctctgtctgaaggaaataaggttgagaattataaagcaggatagctaatgtcctcctcattgacacacatatatacatattctacacatacatatatcacaacatataactgtacctccacttccagtaagcacaatacattagtggtgtgtgcacatgcctaacccagatgaatgagctatggagtgggaggcctctagttctcagcgcagaaaacaatcattctctagattctcacaggtaaccaaagtggagaaacactggcccatacagcatgtcagagcttctggctcaggtgtaaaggaggttttcacactgtttccttcagagcagtggagctcttacccgggtcctgtccgcttgcctcatctcctgtcatatgaacagtaatgcccttatttcctggttgtggtgattggtaagaatgttctctagaggctcagatgcttgaatacctgttcccaggacatgacactctttgagcagtgtggccttgctggaagaagcatgtccctgagagcagtctttgagttttcaaagccataccattctcagttctggttctctgcttgagatttaagataagagtcccagcttctttcttgcatctgctaccaagacttccctagatcctcaaggctctagacattggacctgtaagcctaaataaactctttcttatataagttgttttggccatgttgttttatcacaacaacagaaaagtagttaagacaacagtatcctaattcctctaagcttatgaggtgtttggctcccctaatcttctagtctggactagtgttttctacaaagcaggtccagttgccatgctgttctcgtccccctgggatgatcacagggactctgagttacagccattaaaaagaaaagaaaggaaaaagcacaatgccctctttgaaatacagaaatctcacattctccttcattgttacttctaaatgcaaaacagataaaatgttgaaaacaatgtcatttcggacaagtttaagaagttcaggctgatcttaaaagtttcacttagaaaaagatgcttgatccccaaacacccttgtgtgagaactgagtatgctactatataaccagtctttgtactgtagtacaaagtgtacactgaagtatgtgtaccagcgcaagtcacaaacactcctgcaattaattctctttgttagccaagaaacttgagatcagacaaagagttgtgtgagaaacattcgagttgccaccaaacaaggcaaaagacaatggcccactgtctaccatcaattatcaacttggcaattaagtcagagtcatgacttccgtgtgatccaaaggcattggtggggaaagagaaggtattccagaaaccacaactacatattcacctcaaattctgagatataactagtaaaaccacagtcaattcatattgcactcattttggtccctctctgctctatttaaccattaatatcaatccattttattatagcttcaaggccaaactgactggaggtaaggaagtagcccagtttattgggtcctgttctgtacaagtgtaacagacacaatcctaactgctatgctatctctgcaaactgagctctgaagctcccataatcagcactatgactcttgaccatgaaagagatacagagatattctaaagtttctccccttccccacacacataccacctgctgctgccctctatgcaggaaaaaaaaacactcaagatgaaagagttcataagtattttaccattagtctaatgttaaactaaaatctttgtaataactgtattattttctataaaacactcagtccttaaataatctaatattgtttgtaaaagtggcaaatcacatgtttgagaaccattgtagtctacagtaaaaagttctagtgaggttttgtgtgagtgtgtgtgtacacatgtatttctttgtagattaaatctaaaagaaatccagttggccacatgggataattcttgaacaaggttttaaaattttctttccatttattatatgcagggcatgagaatgtatgctttacccagccagtttcacagaaacttcaaaatattagcattggtgactatattcagtattaaaaaatgattagagcaattttttaaaaagggagggcaatgggcaataacatccaattcagatcacagagagatggagactgaatggcaaggaacaaaaccaaccaagctctgataccacccccccttcttctaatatacggcacagtccaacaatatccagaccttcagagctaagaaactgggcatggggaaaagctgatcaatggatattatgcacaagaaaaagttctttgcctttctcctttgagtgtgcatatatatatggtatgaaagtgcaggagcacatgtgtgtatgtgtgtgaagacattgagttgcctcaatgactccccatcgtaaatattgaggcagcatctcttgttgaacccagagctcagtactgacctaataatatagctatccatattgttaccagatcctctgttccaacctccagagagctgggatcacaagagggacctaacctcaagtaatcaagcttgagctgtaagagtttgctgtgctcacctgtttctgtttacttcctgtaaatgaatgattacatggataatcctacatcccatcagcagactttcaggactggtgagggatgacttgaacaatcttctcaaggccctctgatagttcttatcttctctccatcaactggctttgacacaggtgacaacaagcctctatcatcattgcttgacctactaatgtaaagctgcatgcaggtcaccttcaccattcagtgttcatcagggatctaaatccagtaagtcactaaaaagaaggctcacattatcagaaagagcctgataacaaagctaccccaagacacagtgggaagctgccacacatggtactttgctacatttcaaacagaaacaggagcaagcctttttgtgaatgtggcagaatgttttttgtactatccaattgttttaaattgcaatgccactaaaaacaatgctattgttcaattataaagtaaaaccaagaataaaaaaagacaagagggggacttgtatctattattttttccacaaatccaaattagccctctttgggaaatcagaaatgaagaatgggtttttatcagggtaaactaggaaagaaaggaacgagagacttttttgaattaggagttgtatttgacaaaaatgtcattttatcagaatggcactttacattatgtagagaaaaatacatgtttgtctaatatattttgctaataatacctactaaacttaaaacctgtcatgagcaggtgcccacaaaacttaaagcctgtgccaggatcagagggtacattcagtaggaggagttctagcctttctggacatttgtgaattaggactgagtcccttgcacaccataccatcgtccaaaagatttccaggagtcccagacatgcaaggtatgagctacattccagggaaattgaatggacatggaaaagtaaaatgacatttgtagcatcataccttggtaaattaacattgaacttccaacaccagctaaaacattccacataagatccttaaatttcccaacattctttcatggtccctagagacccactgccttatactatacagacgagagcagtggaaaatgccatcctgtacagccatttgcctagaaatggctgtcttattctatatgtcatggctgtatctgcaacctgcttgacaccatgacctgttgggacagaaactgtgctgttgaaaagcatttccggttgacaacaacatgattattcctgttgcaacattgcgttgaattcctctcctcatggcccatacaaagcattccaggactgcatcaaaatagtcattctgtctttaaattacaccttgaacatactctaagctgctgctctcacctgtttctgtccacatcactcttacctaaatgttcccaatgaccatctaaccctgattcagttacctgccatgcacagacagatgacattcaaccatagtcatcaggtcatatcatattctccatagttcctttccatcaaagataaagctagacccaagagctttacagtgactcataagcagttacctggttccagctatcattctgacctcaatgtagtcctgtgtgcattttgtgtctgctgtatgggctttctggatgctttctaccaatgcttacctaggggctgctggctgtaaccttttcagtaagaatttatttgaaccccactcttcagagaagcatctggcaacacacttttggagcactgaccatgcccatgcccatgcccatacagaagccctgagtgcattctccatgcccacattcacatccacactgaagccctgggtccttctctcccacctggcacatcttccactacaagcatcactatgcttgctctccaataagaatgtttctgtccccttctcctttgcttctctggaccttcggaggataaattcaaaagtatcagggtttactgaggtcctatttcatccaccatgctatctccatgacctagaaacaaccatatactaggcaacaggcttcaacatcaaaaataaagaatgtatgtgaatggaaataattattacaactgtccacttactagaatcagtggacatgaggataggcattgcagttctcttactgactgtccactctgcccagataaatctaacacataacccaatttaacgtctcaattctgtagcaagtcgtattgctcatatattgagaaggaaacagaagcctgctgagcttagttaacctgccaagagtaagtctttctatatttcatcccacattctgcctctagatagcttttatcagaaataaaggctgcacttcccagtaacaaggtgggaacatgtctcactaaacatatgacggagatctgaggaaggatagtttcactaagaatcagaaaagtgaagaaattcctataaaatgacaaacatggagggctttaaatgagagtttttctaactccacccaggttcagcaacaacaagggagggtgacagagagagtcgactatgagacaccccagatggtgagcacagtggcagaagacggaaaagagaagctaaaaggatgcctgggttttgaaatcctaaccaggccatcctgagcattccatgaactttcaattggaagctgtggcagcctgggcaaagcaacttcaggaagaggaagaggccattacttgtagagctataagcaatgttggtgctgcaaacagagctgggttccctctgcccatccagcctctaacacagaaaagagaaggctgaacaggggcagaatgagctcaggatactaaagggttcatggaggctcagctgccagattcaggccaggcagaagtgaatggggaaaatcagagctcaaggtctgcaatcaccagagtattcagaagcttatctgaggcagcaggctccaagggaacccacaaatggttaaactcacagattcctccctgatgagtggcttcagctgcttcagctgctcatcaatagaatctccagctgataattattaagtgaaactagaggcttatatttgcatatgtaaagcacacttcccacagaagccacaatgggagagagaatgtgcttcctgattgtacagcacgaggaggaggatgttgggtggggatccagcctgttctgcatgtgttgctccatgctaatcaagccagatattcaacaaaaataaatcctacatcccaaaatatacttttttatcaaaatccagagttcacataagagacctctctctagagatttgaagaggatgtgttttacaatgagtagctatgagggtggtcattaccaggctgggtgcatactcatgcacacataccccacacacccagtcccctatactcctgggctgactcagtgtatcatgggacagggctgaattcctcaagacagcttccatccctgccactggttcctgaggcttttaatctctgccttgtccatggagatgctttagcactgaagaataagttgactggaaatgccagcagcaccttgtccctcagacctaatggctcacctctgttacttttaccttagtttatgaggaggaacatctttgaagagcatggctctcctctagagaagtatactgcagcagaagatgccaacatacccaaaagataaagaggacactatcctctaacttgacctgaaaaattgggaacttcaaattattagtgtcagttgaaggttctaaaagttcagagagtagtaagaaagccacaagaacaagaatgggtacctaaaattatactcatgatagtctaaagaaatagacaagcaggacaaataaaaataaaagtatcaaccatggttctctttgtccttgattgagtttgtgacccccatgataatctgccatctttttctaaaaaatggagaaaagaactctttaggagtcatcgtacatgagtcatacatttactttataacatggaaatatctaatcatgcatcaattttccaatcttctgctatggggcagaagacttctctatcaggatatgccaaaggcccgaaattccacactgttctttttatataacacacaaagaaactgccaaacacaggtagcttgggtttcttaaggcacagtttaaatgtaaaagacttttttttcatttttaaaaaaatttggatattttatttatttacatttcaaatgttatcccctttcccagttcacccccaaaacctcccatcccattcccgctcctcctgcttctatgagggtgtactgccacccacccacccacccattcccgcctccccgccctcccattcccctacactggggtatccagccttcacaggaccaagggcctcttctcccactgatgcccctacaaggccatcctcggctacatatatggctggagccatgggttcctccttgtgtactccttggttggtgctttagaccctgggagctctggttggttgtcattgttattcttcctacagggttgcaagtcctgttctgatcccatttgtgataggtttttgggtctattttacttactctatgttatttacagtctagatccaatatagtcagatacattctctaattgttaaactgactttagtatctgagtgggggaaatgcatagtgaggtctgagctgtgctatttcctactgtcatggattgttcagcctacaaaaacaatgtatgttaccatatttctaaagtaatggttctcaaccttcctaatgctgtaaccctttagcaatagttcctcatattgtggtgaccccaaccataaacttattttgatgctacttcataactgtaaatttgctactgttatgaattgtaatgtaaataaacactatgcaggatatctgatattcaactgccaaaagagtcacaatccacaggttgagaaccactgctctaaagtgtcactaaagattctaagaacactatttacatttctgatatttaataataaaattactgaaaaggaacctaaggtacgttttatatacaagtctttcttttcctttgaaatgttgcatttgtgcaggagagatggctcatcaggaagaggtacctattaccaaagctgactgcctgaatttaatagctggaacccatattattaagaagagaactgactcctttaagttgctctttgacctctatatacaaagaaataaaaataaattaaaatgcccaagaagagatttgtggcatacagaagttcttgatctaaaggtatgctcacagttgcacctgctattttttagaattgggtggtgtcccaaaggttcatgaagtaaaaggctgctttcctctatgtgatgattttgaaaagtagtagaacctttaagaagtgaacataggggtaaacgagattattagagaataagtaatgctcatcccatgggaactggtaagtcctgtggaactgagttactggttactagtgactagttactggtgagttactaaattactggttactaagggtataacaaaatgagtgtagtgttttctagctccctaaccctcattttccctatccactcacatgtactcttctgtacaaaaaagttccctcttttgctattctgtcatgagctggccctccatatagcattcacaagaaagaaggcagataccaaggccacggacttgatgtccacacctacaaaactgactaaaaagaaacctttattcctttataaagtaccaaggatcacagtttttgtttgtttgttaatagcaacagaaaacaaacacatctcccaatttacccaacagtttctgaagcttgaaaataactggataatgatggaatgttaccaataccatagctagctttgatttcaatggaaactgataagaaaaacactataaaggatatttagccataatgaattcatgggggatggggaataagcattcagcttatatcttgggaccaaaaatggtcaggaagccagtcctcagtccaccccaaatgtgcttgtccctatcccatccaaaactacagctttcaaatctgtagcaagagagtttcaattaaatgcaaaccctttatcctcaagttttcaccaaaaagctttctcagggtaacatggtcaacattctctgaatccatttgcttcccaacacctcttcatgagaagacaactgacaagcttaattagcaacctatttggatttttgcaaaactgttatctccttcccctgacctctgccagtcagcattctactttctgtctttctgatcctaattactctaggaactccaggtaagtagagtatgcatttgttttttaataactaaccccaagtgtactgttatctgtcattatctcaattcttctccacttagtacattctctttaaaagaccaatctcatcattgtaccctatctgctgaaagtcattcatgagtttgagcttatcaaagaaaaatgtttacccaggaggctgtgaacagcaccattgcttcatgcccacatgcagcaaacagtcctatccacatacccattacctgccctttgtctgtgttatctccagggtatgggccatattttcaggatctcaaatccatttcaatgcagccttctggaaaaggacactaacgaagtccttatcttcagtgaagactcccccgaggcctcaatatatagaatacatggcatatgtggtgaccaatggttatatgtcagctctcataaactcaatcacagtaaaattgaattctatttacatgtttgcaatgcttctattttcctttgcttattataatctccaggaagaatcaagagtgtgtgtttttgagttctcatctctctcgagcaacaaacagacttaggggcatgacagaggggctctgaatatgttttttttcctttgtttaatactgaacattagaatagaaccagatctagagtggttcaggaaagacgtgccaagaaagtgaggtttgatcccagaacaagaatgaaggaaggtgtaggcctagtcggccgtcactggaaagagaggcccattggacatgcaaactttatatgccccagtacaggggaacaccagggccaaaaagtgggagtgggtgggtaggggagtggggggggggagggtatgggggacttttgggatagcattggaaatgtaaatgaggaaaatacctgatttaaaaaaaaaaaaaaaaaaagaaggcatggaatttccaagacagaagtcctgagcagaaaaacactaagggcacacagttgttgctgtagttgggaaactgaaagacacctacgtataagcctgtgtataagaatcgggttaacgtgttacaagataagacaatgggctacctcacctggcaggaactgagcttgccaaaggctccaactcaaggaaattatactataatgtgagttacaacaatggagtaagctatagcttcctaagaccatcgccctatgctggaactacgcataggacagtcttactaactgctgagaaagcacgatctccatcttctccatgcctttctgcagcagaaaatccctccacttgtaaggagagcaaacaagagccagatgagctatataactggccccaagccattttttgctggtaagtgtgagagtttgaggttttcacaaaaatctgtttctagcaatcttatattttttgaaaaatagctatttatctactttatttcccaatcacagcttcccctcctctcctctcctctcagttctcccctctcacctcacctacccactctcatctatcctcccttcccttcttctcagaaaaggggaggcctcccatggatatcacagggccttgacacatcaagttgcagtaatactaggcaaatcttctacatgggctacacaaggcagcccagttaggggaaaagaatcaaaaagcatgcagtacagtcagctcagctgccactttaggagtcccacatgcagaattcctaagacccagctgcatgactcttccatgtgtacagaaggcctagctaagtctgtcccattcatgctctctatgaaccccagtggaccaatgttagttggttctgtaggtttttcttgtggtgtcctcacccttctgtctccttcctcagtattccccaacctccacttattgtttggctgtgggtctctgaatcagtttccatccgttgctgggtaaagtctctctgatgagctatgttagggctcccatctgcatgtatcaatagtgtcaggggtggctccctctcatggcatgggtctcaagcatggcaagtcattagttggcctttccctcagatcttcctccatcttttaccccttacctgtaggcaggaaaaattgtgggtcaaaggttttgtggctgggatggtgtcccaatccctaatttgaagtcttgcctgcttacaggagatattcaactatgttcatagcagttttatttgtaatagctagaaactggaaacaacctagatgtttctccatggagaaacagaaaaagaaactgtagtatatttatgcaatggagtattactcagccattaaaactatgacatcatggaatctgcaggcaaatggatagaactagaaaagatcatcctgagtgaagtaatccagacccagaaagacaaacatgatatgtacccagttataagtagatattaatcgcaaagtataggacaaccatgctacaaaacacagactcaaagaagctaaataacaaggagagctggggctggaggatgcatgaatctcactgagaaggggaaatagattagacatccacgattgacaaaaagaggggactggataagggtggggtgggtacaggaacaggagggatgacatggaagaaggatggaggaagatattcctggaagagaaaactggatggagggcagtggcagggatggggcatctctgcaactagctagaaagctaggacagaggaaactcccaggaatctattagagtgatcttatctaagactcctagctttgggagatgtggagcctgaaccagcaatctgtactttaacaaaccatggctctcgtcaagcctcgagatatgtttaacgaatgcttatttaaagccctgttctataagataactctgtgttcttctgcattgcaaatactatgagcacaagttgtagggtggtattttggtatcaacggatgcttttttacaaaatactaaaaagtggctgatgccacttactgctcattgtgatagctgatgtaaatacttatatcccagtttcacagtattcccaaagggatccgattccagaaactaactgaaaagctggagtacgtgtcatcacaggcaggggaatctcctaaatgatgtcagtcaggacatcaacgtcttcagatcaaagactgtggtgcatctgacacatgttacatgttgtacatacaatgacagaaatttataaatagcatgcaagctctgatgataggaaaacacaactgagaattcacaacacgtatcagaagattatgtgtgaagttagcatataaaacaaagactgagaaagagatctatacaataaaatacagtttgtaatatacaataaaatacagtttgtaataatagaccatggacatgttattatatttaataagatattttacccattcagaacttttcaaagaatgaccaaatattaaatactctagacttctgtgggctatgcaacctctgttagatcattaactatgagcatatacatgatagaactctgttccaaaaatccctctctatagaattctatgaccgcacctgttttctcatatatgtcaaaacaatagtgtagaaattggcttttacattagaagaatgcttttaaaaatttcaaaggtttagttgttgtaaatccttttctgtcaaaccaatctcattctgattaataaaaggaactacaacactaagattttaagcatttacacagggtgacccatctgtgtcagaaacagaatcagaacccacaaaaagcaaaatcttcccattctggtgcttttgaccatattcacctgtgttgaagggcagagaaaaaatcagtttgtgaaagcaactttgtgaagcatcctatgagttgaaaagctcaaaatatgacttggtctacatctatacaaaaacagaggggctagagagatggcttagcagttaagagtactgactgctcttccagaggtcctgagttcaatttccaacaatcacatggtggctgagaaccatctgatctgatgccctcttctggtgtgtctgaagacagccacagtgtactcagatacatagtataaaaataaataattaaaaaaaaaaaaagaacagagaccattgtcacaaactgatccaagggtgagggaaatcaaaacagctggtagtcaaagggaggactatctctaacatcttctctgtcttctcctttctcctcagaaatctaagtttctttcctgtcagctcccccaggctgcaggtggtggactctttactcacagacaccgacagattcatattttctgatgacacctgttagacaagtgccacttactgaactcagcttagctctgggttgcctctccaaattcctgagatgagaaggctgccagatcatcagccaccttggagaactgctagacacaggttataggtacactgtccatctaatcatgaacatgaatgaggcagtcctttgttagcaaacacaaataggattgtagtactatgaatactagctagtgctctgagcaaacaactcaggttgtacaagcaaaggcaaacacatgtcccatcttgcaacctaggggaaagtgtggtcagatacaaagtgtaaaaggccaaattgaacagaatacactggccaaaaaggtacctaagaaggacgcatttgtgcaattcagcaagaatcagaaggacctggaaagacttcaaaggagcatgatataaataatcatacagatgagaaattcagtatgtaaatacacacacacacacacacacacacacacacacacatgtatgtatatatacacacacatacagtaagacactcttacttgatatgaggagatactattttgacatctgtggaaagctgctttgtatttctcctagaggtagtgtgccaaagaacaaggaatcttggatctgaaaagtttattaattaagatagcaggtgttcatctggacactgaaatacctaagtcaacacaacaaacatgtccctaatgtgtatatgagaggtgtgttacaaatggagatgctagcatagaaaatctctgcttcctctgtccagtgatctgtgagagataagaaggacaatctgagcttcagttttatttttagtacttgcctgtttctgctcctggctgacccagagctccctgagtgtcttaatgggccaagatctaaggacagtgtggtcatcaatggacaggctcccaaatttgaacaaaatacttccaaactgccctggggaagaggtacatctatgaccacaccactacatggtcaaggtatccttgtggaggtacaagtgacatcccttatgcaattgctttccttgtacatattcttatgaaagaactgaacccaaggagaatcacaccaatgtgttagggcagggattcttaaccatgagtgcacagcagcatcatttttagagtattgtataaaatatatgccagcccattatcacacgaattctgattcagcagattcagattgtgacccccaaatcagccttctgcagaattttccagattttttttgcataatcagcattcagaacgaaaggttttagacacagatactaacacagctacagagcccctaagtaagggtagtatcattttccataggccaagaacatggcttaaaaccacatatatatacagtagtgatgtgagctctgagaaacaaggccagccaactcatattccaagaggacttagaagaaatggaatgccaacaccactaggatttcagaagcaagggtggtgctcaggaatagaatggttatgaatggaaaaccccatgatccctgtatcagaagggacttctggacaatgttcagtttgactgtggcagagccttccagagtcctgctatgcaccttacctaaaagaattaacctgcccttttcttaggtatcagtattcattccccagatacgcccagggtatttttttttaaatgtccctgctccaacgtagtatttcttctaagacataacctgtattggttaactaatatgaaattttgtgcacacctgtttgagtcatttgagtcttccatggcagatttaccctcccacttctggaaatagaccacttggaaccaatccctcacacgtgctccatacattattacccatttgttcttttccagtacataaaccagtacttcacatgatgcttctctgtaactgtcatcctcatgaaaatacaagctgaaaatacaatatgaaaatacaagatctgaacaactacctagctgattaatctcttttggctatacactgccaggtacaaaggaatgaaatattcacattatcccttcttatatgttccaccctctttgtaggacacaagctgaaggcatccaacaatgtcacccctaaatttctatatctgtattctaactcctagcccatcacagtgtagtggaaatagtgttcctaagatggattttaattaagaggaggtcagctttaaatagggaaggccctaatataataaatctgatattctcataaaaagaaatacgcacccttccatccctccatggctggccaaacacatgcacaaataagcagttctgatggactcaagggctattaacaacagcaacagcaaaatgaacatatgaagttgggatggagaatggatagaggcacatggagaagttgagggaaggtagtgaaggatgtctctggtcaagaaacattgtatacatgtatgagaccttcaaagaatacaaaatattaatttcaaaaggaagggatttggaacaggaggaaaaacagactagagttaggaagtcaaaatccaaggaactatcagaagggagaaagaggtgtctagaataattctttcctggaacctaaataggcaccataggtttttaaaaacagagacttcagacttcaatcttccagcagcataagtaagatggtataatctacactactcaatctttggtccttgcttgatatgtcagttccagcaaaccagtatcccgggggatcaagttaagaaaaatcacacagcaaggctacaaaactggagttccctacaaataatgcatcccctcctccaaaagcttgcaatcattgcaaagatgggccagaaagagtggaagagaggagagcagaggcagcggatgacacaggggaaaggtgtcttctggagacagcaaggcagttcacatgtgatagaatgcacaagaactgtgtatgtccaagacaggccaatcccagcatggagatgagagggttaggcacaaactcacacccctagctgcggagccagaggtgactgataggcgggagagtggtagccagttttactaagaaaactgaccccttcttcacggcccctggtaactcagccatgttccagtgggaagccacacatccaagaatatttgggtaacacagattggtcttcacagttttcttttgaaaagctgagtagacaaatataggtctattttcatttttctacatacagacagccagttagagcagcaccatttattgaagatgctttctttattccattgtatatttttggctttgtcaaagatcaagagaagggcgaccctgtaggaagacaagcagtcccaaataacctggacccctgagatctctcagacactggaccaccaaccagtcagcatacaccagctgatatactaggcccccaacacatatacagcagtggactgctgggtctgggttcaatctgagaagatgtacccaacacgtaagagactggaggtcccagaagtttacaggtctggtgggggagtgggagggtgggggagagggaaaagtaatgggatgtagaacagtcagagggtagactgggagggaaataaactgtggagtgtaaaataaataaataaataaataaataaatttttgaaaaagttgagtagatagggtagatctgggaagagtttgagaagaggaatgaatatgatcagaacacatataaaattctcaaataattaacatatataatatatggggttcccagtgagttcaggatccctaaagatggaaagaggtcagagtaagtgggcagataagtgagatgattaagtttcagggttatcactagattaaaaataaaaaaagcaagtgggcttataataatataaccaacaatatcttgcttgggccttgaagcatgtagggcacatacacaacactttcaagatattgtaaagttagttttaattatatgtaggggcatgtgtgtgtgtagaggtgtctacagaggacagagaggaaattgtatttcctgaagctagagctacagactgctgtgagatgctttacaaaggtactggaaaccaaacttgaatgaactctcttaaccactgagcagcctatacagacactcaggaagacctctgttgtaaaatctatacagataagttcttatcttcactcccagagactgggtataagcagcctacccagtctggagtatataccactccacacaatgaaaacttttagagaagtcataaacaatcttaaccatggctctgtactctgggttcccacttatagacttcaggcttttggaaagagtgatgtgttcctgtgagtgtgaaagaacatatcttgtccctgggattagcaggaacaatcctgactttatctccttgagacataactcagaagatgaataattacttcagctcagatggcttctcaaaatacccactgtcatatgctggaaggagggggcggggaggagagatatgctggtcattagaaatgtcatctgcctgttctgcagaaattaaatcaaagcatcctttagatgaagtgtgacaatcatgcagttgaaacccagaatatcaatgttaccaatactgtcagcaaccacccactcagttatcagctagaggacgctatgaagacacatgtagatttcttaatttcaccactgtttttcttgttaatttaaaaatatcacagttttaattacactcaatttaatgaaatatatttgccagcttcataatttatattgctgaaaaagcacttacatttcaaatggtatactttgttctcatacatccttaaggtgaatttgtatctaaaactgtcagagtggtgggggtgccgagagtgctagagacccttcccctaagacactcagaggcccagcttccactagataagcatctaagtggtggagagatgaaagtgaaagtgaagcagaatattgtgtgcacagtgaagagaggcagtagcagcagctgcagcagaaggggaagaagaggaggaagagaaggaggagaaactcaagggggtaatgaatagcctgaagaatgaagggcctgagtgtggggggaaagggacatctctaccatgctctgtcccactcaccactctttgacagttttagatacaaatctatcttgaggataatgtgagtagcctgtgatccatttgaggccatggtaaatctttgttccatgctgctctggagggccatccttaagtccatggccctgcaggggtctgtgttgatatctgtggctcatgtaaacaatagctgttctagactgccacctgaggccatgttgatgtgccagggttctgcagagctggcaccacccttagcttagtcagtgtgggagagctggcgctaaggcatgagggtgggtaaactggccccgcctctccctagctgtatcactcctgaaagcaggccctgccctgcaccttgcctgagcaccacagtagaaaaggccctagtggtgtgggaaagccagctccaagggcattagagcacaggggtataggctggggatgtaggggaatgaggaaaggtagggagaggtttgctgcctattgtactcaagtaagctgacatgcctcttcctggggcagtgctggagagctggtgcagctgatatgaatgctagagagtttcctggcagagcagtcaggctgaccaactcagctaccactcaggcccaaatccagggttttgagtttggccacccaaacatctaccccaactttgaactggtcctccagaaccaaagcttcaagagttctattacacaaagcaaccaacagaatgtcgagaggagtcccagtgaggacccaatactgatagtattgtagaagctagaggcctgtagccaaactaatgactcaatgcaatgaacatttgcaagtaaagctgtttgggcaaaagggtatactctgagacacacagtaacacatgtagcttccttggtgagatgttgttgttgctgctgctattattgtgtttgtttgtttgtttgtgtttgtgtttgtttgttttcttgggggtgcaagggcagatatagaggcactgggggatgagtgggattgtggtacatatgaaatttacaaaaactcaataaaaaattaaacacacacaaatactgtcaaagagctatggaaaacatctaaatattaaacaagttgtcaaaacttcccctcccccaaactcctcataaggaataaagtgattgggtcattaactatttgtgtgggaagccattaaagcagaagttgaaatcttaattcataccctcagttctcagaagtcagaggttcatggcaagattaccagagtctggatggtatatctgctgtttgtcagccttgtgctttcaggcttgataaaagctttaggcctcacctcccttctgttaaatgggaatgatatcagtacctcttctaacaggttatgggtgatgactaatccagacagcatgtataaaccctttagaatagtgtcaagaatacttaaacattttttagaataagcacttccaacattgatattgtacaataatacaaatgtcaatatttcactaaatatgagcataatttggctaaacagatcacccacacatttctttgacaaggctacctctcaaatgtaaatgcttatggggtttgttgtgcttgctaatttgaaatttgcactttagtagtaactctttcagatgtaacacacttttattagtgtatgctacttatacaatgggatttcactgtgacatttccacatgtgcatgtaaaattttctgctccaccatctttacatagtgcccaatgccacagcctgttttggtagcaatgctgccatgaccttcggcatcacaggataacgagaagaaaacggagcaaggctagatatgtacataattcagttgcaccaaatcaaggctaagcatctggaattaagtgcagaaaggctgggcttcttggatgtgagaaaggtaggaaaggttatccatgttgctgtcagttgagcaatctaagtcccagaacacagtgacgcatctcttgccaatgctctgaggctaacatacagttaccagttgttgtaaaatagtcaggatttcaaatctgtgaggtctttgttacaattcatatattaacctaatatatgttttaaaatttatcttcaatgattttatcattatttagcatataactagaccaaggttcatcactgtgagtgttctacataggtataccctgggaaagcctagtgcccatgcaaggcagaagaggatcttgtctagccctaggattcctacagtccacaatctgggatatcatcctttctatctttgccagagtcatggatatacctattccaagacagcctcctcaaggaagtcttccctgccctgcaaaatctccactttatacttacccactgtgtgtgtgtgtgtatctgtgtatttgtctgtgtgtgtatatatgtatctgtatgtatgagtatatgtgtatgtatgtatgtatgtatgtatgtatgtatgtatgtatatgtgtatatgtatatttgcctgtatttgtgtgtatctgcatgtaggctagaaaacaatcttagctatctttagacagatgttgccctttttgttttttaaagacaggacctcccattaacctggaatatggaatatcattccaactggctggccactgagccccagatagatatggctgtgtcttcctccctagtactggaattatcagcatatttcaccatacctaactttttaaaaatgtggactctgaaaacttaactcatgtccttagcacttaatcacccaagctctctcctctgatctgcatgtttatttttgtttgttcatttgtttgttttgttttatttttattagttagagtctcactggctggactactattcactatgtagtccaggctggcatcaaactaagagatatgtctgcctctgctgcacctgagttctgggctcaggtagtgtctatcctatcacatccaactggacttggcccttaatatttttaatgatacttctcactggtagagagaactgatttcttatccatttccctcactggaaaggaaattttatgaacctgcaagtctgattgttgaagacattaatgaatcccctgagctgagaacaccaaaggacacacattaggaacaagaaaaggaaatgccctataaaatagatgagttctcatggagacactatgctgctttctactcaatacagtcgtgtcagaagctttgcttgcacaacaactcagcaggtgctgttgatttctcagttacttctttgctgtccaggcagagtatgctatggtgggaggaggaaagaaaactggaagactaatgttccctcccatgtggaagagggagaaagagaatctattattgtcaggtggtatcaatgccagcatgagtgtcacccacttaaaaagtaaaaatatacacttatcagtgagtacatatcatttgagttcttttgtgattgggttacctcactcaggataatgccctccaggtccaaccatttgcctaggaatttcataaattcactctttttaatagttgagtactactccattgtgtaaatgtaccacattttctgtatccattcttctgttgaggggcatctgggttctttccagcttatggctattataaataaggctgctatgagcatagtggagcatgtgtccttcttacccgttgggacatcttctggatatatgcccaggagaggtattgtgggatcctccggtagtaccatgtccaattttctgagaaactaccagactgatttccagagtgtttgtacaagcttgcaatcccaccaacagtggaggagtgttcctctttctccacatccttgccagcatctggtgtcacctgaatttttgatcttagccattctgactggtgtgagatggaatctcagggttgttttgatttgcatttctctgatgattaaggatgctgaacattttttcaggtgcttctcagccatttggtattcctcaggtgagaattctttgtttagctctgagccccatttttaatggggttatttgattttctggagtccaccttcttgagttctttatatatattggatattagtcccctatctaatttaggataggtaaagattctttcccaatctgttcgtggcctttttgtcttattgacggtgtcttttgccttgcagaagctttgcagtttcatgaggtcccatttgtcaattctcgatattacagcacaagccgttgctggtctattcaggaattttccccctgtgcccatatcttagaggcttttccccactttctcctctataagtttcagtgtctctagtttaatgtggatattagcccagaaacttagaatacccaagatataagttacaatttgcaaaacacaggaaactcaagaagaatgaagaccaaagtgtggacactttgccccttcttagaattgggaacaaaacacccatgaaaggagttacagagacaaagtttggagctgaggcaaaaggatggactatctagagactgccatatccaggaatccttccataatcagcctccaaatgctgacaccattgcatacactagcaagattgtgctgataggaccctgatatagctgtctctagtgagactacgctgccagggcctagcaaacacataagtggatgctcacaatcagctattggatggatcacagggcccccaatggaggagctagagaaagtacccaaggagctaaagggatctgcaaccctataggtggaacaacattatgaactaaccagtaccctggagctcttgactctagctgcatatgtatcaaaaaatggcctagtcagccatcactggaaagagaggcccattggacttgcaaactttatatgccctagtacaggggaatgccagggccaaaaagggggagtgggtgggtagggggtggggggggtatgggggacttttgggagagcattggaaatgtaaatgaggaaaatacctaattaacaaaaatttaaaaaaatttacaggctggctgtgcatttttaagtttagagatgttgagggcaatgaagatcaccatcactgcgcagtccacctatcaagtccagtctccatctacatccccagataacaagggatcccagtttagcatctgtactaataatcaagagaaagatttcgaagagaggaaagtgggcataaggggaaggaactctccatatggtgagtgaaatcagaattaataaaaattcaaacaaaccttagaagtggaaacgggggccattgaagtctccttgatcaagagctaatgtgaagatcatggtgaggctagtgttgcctagtacaagtccctccagtcaaagacaatagcactagaagtcacacaagactactttcccaatcctcagtttttcactccacataaaccacccatctctgacatattccagactgcaaagaacacatgcaaagctctcttggaccttgtgttagaagcttctagcttctcccaattccagaagctaagaagagccagtgatgcagacacctcaaaactttgccttagaagggcccaggtagacagggcagtcttgggaagtgtacagaattatgctgatgagaacactacgccatgtagggcagagaaaagaagtaatgcagaagctggagatatggctcagtgggtaaaggacttgccataaaagcataggacctgaatctgaatttctagaattcatgtgaagcctggtacacttgtgtatatctgtaatcccagggttcctatgatgagatgaaacatggagacaggaaaactcatagaagttctgaatgactaccctgacaaacacatttgtaaacatgatagactttactgtctcaaacaaagtggaagaagaggacagtactgaggtggcactcagacttaaacacatggaacacatataccctcagccctgcacatgcattatatgcacaaataaacaagccacagaaataccatgtaccatcaaccaaatagaaacaaaaagaactatacaaagaatcaataaaaccaggagctggttctctgaaaaaaaaaatcaacaggatagataaacccatgccagactaaccagagggcaaagagacagtatccaaattaataaaatcagaaatgaaaagggagatacaacaacagaaactgtgaaaattcaaaaaatcatcagatcctattagaaaagtttatatgcaaaaaatggaaaatttggatgaaatggacaattttctagacacatacaatgtatcagagttaaaacaggatcagatgaaccatccaaacagtcccataacccctaaagaaatagaagcagtcattaaaaagtatcccaaccaaaaaaagggccaagaaccagatgggtttagtggagagttctatcagacctgtaaagaggacctaataccaatgctcttcgaactattccacaaaatagaaactgaaggtacaccatccaatacattctatgaaggcacaattatgcttatacctaaaccacataaagaccatactaagaaagagaacttcagacaaatctcacttataaacactggtgcaaaaatactcaataaaattcttgccaaccgaatccaggaacacatcaaaacaaatcattcaccacaatcaggtaggcttcatcccagggatgcagggatggttcaatatgtggaaacccaccaacataatccaccacatgaacaaactcaaagaaaaaaaaatttgataatttcattagatgttgagaaagcatttgacaaaatccaacaccccttcatgataaaagtcttggaaagatcagaaattcaaggcccatacctaaacatagtaaaagaaatgtacagcaaaccagtagccaacatcaaactgaatggagaaaaacttgaagcaatcccactaaaatcagggactagacaaggctgcccatactctccctatctattcaacatagtatttgaagttctagctaaggcaattagacaacaaaaggaggtaaaagggatacaaattggaaaggaaggaagtaaaaatatcactatttgcagatgatatgattgtatacttaagtgaccacaaaaactccaccagaaaataaagcagataaacaacttcagtaaagtggctggatataaaattaactcaaacaaatcagtagccttcctctactcaaaggataaacaggctgagaaagaaattagggaaatgacactcttcataatagtcgcaaacaatataaaataccttggtgtgactctaaccaaacaagtgaaagatctatatgacaagaactttaagtctctgaagaaagaaaatgaagatcacagaagatggaaaggcctcccatgatcatggattggcaggattaatatagtaaaaataggcaccttgtcaaaagcaatctacaggttcagtgcaatccccatcaaaattccaactcaattcttcatagagttagagagagcaatttgcaaattcatttgtaataaccaaaaattcaggatagcaaaaactcttttcaacaataatagaacttcttggggaatcaccatccctgacctcaagctgtatcacagagcaatagcaataaaacctgcattgtattggtacagagacaggcaggaagatcaatggaatagaattgaagacccagaaatgaacccacccacttgaccattgacaaaggagctaaaaccatccagtgggaaaaagacagtattttgaacaaatggtgatagtttaactggcagctagcatgtaagatccattcttatctccttgtacaaagctcaagttcaagtggatcaaggacctccacataaatccagatataatgattatatagaggagaaagtggggaagagcctcgaacatatggacacaggagaaaaattcctgaacaccaatggcttgtgctgtaagatcaagaatcgacagatgggaccttataaaattgcaaaacttctgtaaggcaaaggacactgtcaataagacaaaaaggcaaccaacagattggaagaagatctttatgaatcctacatctgatagagggctaatatccaatatttacaaagaagtcaggaagttagattccagagaatgaaataaccctatgaaaagatgggaagcagagcttaacaaagaattttcaactgaggaatatttaagcccctaaagaaatgttcaacatccttagtcatcagggaaatgcaaatcaaaacaaccctgagattctacctcacaccagacggaatggctaagatcaaaaattcaggtgatggcagatgctagtaaggatgtggagaaagaggaatactcctccattgctggtgggattgcaagctggtacaaccactctggaaatcagtttggtggttcctcagaaaattggacatagtactactggaagactccttgaatgctgggattctaagcaggcaccaccacatccagtccatgcagggtttggaattaaacttatgtgtatgctaggcaagaacactatcaactgagctacattcttaaccaaaataattgtagtgtaagtaccctaatttcactcaggattactcaaaattctcttcctacaattttgcaactcaaattacttttctccgaataccacttaattgattcggtaccttttacccatttataggaatgcttatgtgcactgagataagatttgtcctatagtttactgaaagaccatatatcatatagttagtttacatgaatggccatacgtcatacagtcagtggtacgaaagatgaggagaagctgaaaattggtttgtttaaaaacaaacaaacaaaaatattcaaaacaagattccaagcaccaagcaccttcactataaacagttctctggtgttcatctttgaatttaattcctctgtgcttaattcccaggtctatttccaagcctgactcacagcacatgccctctgtgagagatagatgattactcattgttgtctcaggaaactagcaatacctggctggagcttatgagacatgcacactcttgggctcattcaagactggataatgtagaagctatagggaaaggtgctgtgatctgagaaagtctgtagatcactggctgaggagtactgctctagtataaacccctggaccatgttccatcctgccaccaagcttcatatgatatgcagtgagattcaactactatagcacatgcagagaatacatatagcaccaggcaattaggcaatcaaaatacattaagatgtactgccttaataaaatgcaaaaccagaacataagatgctaacttcccactctatccaaaggttggaggactgacttgattgcagatttttggtaaaagagacattagagttgaatcttacataatgacaaggatttagacactcaaattaatgagctggaaaatacaaaggacaaagcagatttcaagattcctgagcatagtggcccagaatcaaacttccttgttgtatctgaatggctccacaagccctccttgggctaagttcttaccatgattctaaaggcagcaaggactgctaccttgctatccaatgaatatcccttcccattgactgcttacactcaaaaaagcaaagacaccattgctccggttctgaaaggccactcaaagccatttacctactaacacattgagctcatgttcttcctgcttcttaatggctcagggtcagggatacttaggacaatcttggacactatagcaccttaatcttcagtgagaaccatgaagtaaatgccagacggattctggaaatctctgccaccattaaaccatcacatcacctacatggtcaacctcctgatctcctagaaggatagagatttaaaaaaaaaaaaaacaaaaaacaaaaaaaaaagaaaaaccctaggttcaagtcatggttgttggatagctgttgtcatatgctgttgtgtcttgtataacagagataccactgcatcttctttcaactgtttctaccaacagaaccccaagctctttttccacttagcaaatagagtttatatcaatttcccattgtggctcccacttactcccactctccaaaatgttactactgcatacctagttaaacatttgaccacacagaggcataagtgtaccattttcccacagcacctgcattctttctattcccataagattcaaggtgtcactcatgtatcaagaacatcaaaattcccagaactagttagaaaagcacaatctcttactaatcagtccacattttaaaagttacagcttgagaaacactgaaaaccattcaagtcttcttccctttttcttttttttttttttccattttttattaggtatttcgctcatttacatttgcaatgctataccaaaagtcccccatagccacccaccccctctcccctacccacccactccccttttatggccctggcgttcccctgtactggggcatataaagtttgcgtgtccaatgggcctctctttccagtgatggccgactaggccatcttttgatgcatatgcagctagagtcaagagctccgttcttccctttttctattcgtatagttcccaattaaggaggcagaaatacattcttaaactataccctcctgcctttgcatgtatcttgctccttgtcaagttttctacaaccttaagggggatctatattagcttataatgttaagcatctaccttgaacaaaataattactttcacagttacttgcttctatttccattataatttctgccttgagcactcttactgtcttcagtttatctgcagatcctcgaaccacttatgcactgcttcctggaaagcatgctaagacaactgttctctccctaccttccaaataggtggccaaaacagactacagtttttaagaaatttggtttccttccttccttccttccttccttccttccttccttccttccttccttcctccctccctccctccctccctccctccctccccctctccctccccccgtcccttcctcccttccttccgtgtgtatgtgtgtgcgcatgcactattctggttttggcttttaagggagagaaaatatgaaatgggttcaatagggaaggggatctagaaagagatagggataaagaaataatatgactaaatgtcaaagaacagtgtacttgcctagcatgcacaacgctctgggtttggtcccaaatactgcataaaccaagcttggtagtataagcctataatcccagtagtatggagatggaagcaataggattagaggctcaagataagcctggactgaccctgtctgaaaagtaaatgagagagacagaaagacagagatagaaagaaaagaagaactacatcaagtggaaaatgtgtggcatttcatatcaactcactaattactggatattagttctctacaccatagcctgacatgggagcagacaaggcagtgtgtatacagcatgagtgcaaagaatgtagcatgcagtttctgatctgaccttcattcctcctatatatcctaggtttagaagttccccacatctattcttttccacggcccagcaaaaatccagaatccagccactgatggggacattatttagatgaaagaacattttctgcagccatcccaggccaagaaatagcaaagaaaagcaatacaaatgttaataggaacttgtctattcacttttccttaggctaatctattacagtccaacacagggaattagacagatgatgggctagggaaatgggaatcctgaaatgctgaagctcagactagagatctcaggaggatataaattctaggacaacaaggctctgtggaaatcaggacacaaggcttcttggggcatctccatgagggaaatcagggtttttactctaggacctatgttcctaggaagccaagaaatagttcctgccatagttaatcatggttctgtgtggcagagataagaagtaggtgccatctacctctatccaaacaggcaaacaaataaaccaatagtggcaaggcagtgtgtggtacatgttcttagttgacagattccagatgttacatagacaagaaagagaagggcatcactgagtcagtggggcaggagagagagagagagagagagagagagagagagagagagagagagagagaggaaatgagcctcatagagatgaaaaccataggaaccaagactgatgtcctttggaattgctaatgatacacacacatccctcacatgataattcctacaatgtgaatgttgtattacatggtaaaagaaactctgaaagtaggatgagtgcctaagataaggaaattattcctaaatggaattcatgtcatcacaaatgtccatgtaagggaggtcaagggggaaggtacaagtgagaatacatagcattgtggcagtgggtaaaaagattggacagatgcgctttgtggggggggggggggaagagaagaaaggagcacaaagcaaggaacacaggtggtagaaactaagaacggggaagaatagactattcgtgcatcatggagctgacaccatacctgtaaggccgatttttcaacttctaacttccaaactgatgaacaaatgtgggattatcttcagccagaagacatttggtaatgcatgatagcagcaactggagtgggaggcatccacatccattagagtatgtctttgggaatgttaaaagataatgaaaatgagcaagcaacccaaatcatggatgggtctgagttcatggaaatggaccaaggacagggaaggtatcagcttagggatacagattacctatggaaaatattgcatctgcttaaatcgtaggaattaccacatgcctaattcttcagtttattgacttttgatgctttaatcatagactgtaatgattttatgaaaagagaaaagagctggtgaaataggtaatgatctcatccttcttaattagactcaaatgttccctaagatgcatctgtgcactgcagagctgagacgtggataagcacatgtgcagactgaggaactgtgctggaagttaggaactctttcccaaacactagccagagcactgttagttatctcgcccaacttcgacttcaggaaaggtacgggtaaccagcactccctgagtactcatccagaattatatggtgatcctcctatagagtctgaccatcatccttcctcaaagctttctcagactaagcttcgtgggactttgtctaattccttgagtaaatgaagtatgagacccagtacccattagagatgagtagagagatcagagataattctgtagctcgcataccctctatgccctccccagtcttggtctatattcacaaagacttttccatgtaaaaccccagcactacatacctgcccgtggtaccctgacccattctcacacctctgaattctactattactcgatactccctcaacaaaatgccacttgctgctaaaggaatcactaaggtggcaccatcaaacagccccggatatgaagaagctgcatctgctctggcattgtcactagacactgaggtcacaggtcagacacccagaggttctaagatagtgcctttgtgtcaccaagtcagtggactgcagagaggaatggatttcccttccagaggattgttagagctgagctcagaactgatgtcttgacactgggcagtcacttgatctcaggcaaaagagggaatcacagtcttcaggagacctcaacaactccagatcacatatgtgacaaaactgaaaaccaaagatactttctgcgcgtacaacatcccccaagccacatagctgtgtgtcaataaaacagcaagcacacctaacagtgaagggtaaggctcagtgctcaggttgagctgtttaaagattctacaattgaccatgcctataggcctattcttactctatttcttcttttagaagctgtactggtgacagaacttatttttgaagataaacactagcaactcagaaggtgtataaaaagttatatctaatgaagactatgatgaacaagcagatggcaaagttggtactactagcaaatcgcatctggtagccaccagctgcacctctactttatgtctctacagaataccttactacctgccttctaatatctttcttccctatcctacaatatccacttatccctttgtgacttagtccccaaagaatacagtgacttgcccaaggtaactcatttttctgcccaattcttcagattttcccattatcctataatgattacagtggctccatttatcacagaccaccctaggccagattctagacctgatacctgataatgtgattgtatgcactatcatatccatccaagtcaatgagacacaaattaccacagtaccactgctgaatgggcagtgcttgcccaatgacaaagacttagcaaatgcagagttctgtgagatatgttttgtatcatttattgtaaccctaaaaatctatatgcatggatcaacaggttttgtttatagatgaattaactgaagctcagcaacaggcatgccccaagagttccacatattataaatgaaaactgtttccatcaataaatatttggaacacaggactgcctctcacaattaacgtcacctagtgagaggcagcaagaaatcaagtttctaaagaagacagtgagaaaaatcaagattctgctctgggctgtcttagcgatatgttgatgtgggaatgtgtgaccttagagaacataagatgaccgacccctcaaagacttagctagaatagcatcctggggattttccactagaaggttgtgatgaacactcccttcccggtctacaaagtgagttccaggacagccagggctatacagagaaaccctatctcaaaaccaaccaaccaaccaagcaagcaagcaaaagaaaacaagaaaaccctgacccgaaaggcaggtgcagataacacccaaaactgtctcagttccctcttctggtgatgaagacctcatctcacctagggctatcaatgctgcttagggaaggtcatgaagtaattgccatttctaaaggggggaatgaaaaggtcagctctggccaacaatgggtttaaaccaactcatgtagttaccaaggtctacccttaaactgtataaaaagtgtgtgcttaggagattcagggtagcctctgctctcattgcagaaccccaatgtgctggatcaataaacctcttcctttttgcattgatctcagtatctgtgtttctgtgagtggggcatcttggacataaggctcttcaggtcttacactggcagtgtgtagtttgaccaaagatgtgtttatttcaccccaccagactggctgcatacagatgcctgcagttctccaagggtttttcccatatagccatcatggttcacaaggttaagccttccacctaactaacacaggcctccacagcactgccttcatggctaaacggtgccttctcaacagctcaaagaggagggaggctacctggaagggcaccatctgtgctgtgggaaaggcagcctcaaggtgggaattggcagatgtggttctttgcaagggaagcaactcagcaaggaaggaggccacacatcctagtattccataatccccactaccacatgaccttggccttggtctgccaaagactaagaacattcttaagcaagtaaatgcacactttgagagagtgacctagctcctcagaggtggcgtggtagtctgccaaaaaagtttgatttctcaaggcacatgggcaagaccctaaaactgtgcctacaaagccttcagcattgacccacaatctggacccaatgcaaaatgaaagcacccaacaacaaacaccatgagtaccccatcattcatcattcaatcgtctacagttgaacagggagaagtacacaagagcagcgacagctgaatgatgttatggccaacaaagaccaagggcaagaagagagaaaagcagctggcatccctcctgcactaccttgacatcagggatgtctctcgggactacacttgccctgtggaccacttagctcaataacttactgtgttgaccagtgggaaaagccaaagaacacctggggcagggggagggtaggaggagaattcaggtgccatataatcaaacttgtacaaatcaattttggcatgccacagatggtctgtgtaactgagaaaagctccagctgttaatagctggggtcacaaaactccatctacagggcacagccaaaactttccaggcacaccgaattcaggtacatatgcttcctcccacctattctctctagtggcactggcttccttgccaattccaaacctagttcccagctctttgaaatcataagaaccttttcaaatagaaagccaccttagaaaaatgtcagtttgtaaattcactgattggcattctctacctgtaggaaaacagttctgggggtggggtggggagaggaagagaacaggattgtgctgctctatttagcttccagatggagctgcctcccacagtcaacccacatacctaagggctgatgtcactacaggaattttagtagtactgtaagggtgtgggggtgagcagcaccataaagatcaacagcaataaacacagctgaggaagcagagaagacagaagctagggaaccacagttcatttagctcaggaaatatccccaggaagcgtcatcatgaaggggtccttcaggtgttttcggtgtcactaggatagagccaggcttatagtaaggcagcggtacttgaccaggctactgaagtcaggagtttaggacatgatgcagctccaaacagcatttagtcagacccccaggaaaaacacccctagccatcttgtgcaatgagggaatgaagagcaatcctggagatgttttccactatggaggactggtctccagggatagactggagactactgacagccaggggagaatgaggatgtaattgggataagggggagtaggcaggaaaagaggtagagaagagaagaaagagaacatggggggaaaagagaaaagggatggagaggaagagagagggtaagagagtaactgtgactgtgtcaagaatgaacgcttttgaagaaaaagtgacatataaggtgtttaaagtgatgcctccaaaatatctcagtctgggctaaagaaatatttcaaaggtttgagtatttactgggtaacatctactcttaaggctaggacccatgtccaacagtagatggctaacacacacacacacacacacacacacacacacacactctctctctctctctctctctctctctctctctcactcagtggcatttttgttatgtgtctcataatgctttgttagggcttttttcctcctcgcagattctttacatatatattatgtttctagttttgtgtttttatggcatatctgtgtgtgcgaatgtgtctgcgtgtctctatgtctatatgtctctatgtgtttttaagctttttcttttttttttgttctgtttccctgctttgtcctattgtggtttgattttattttatctaattatattttattgtgttagttttggatgcctgcttgtatcctgatgagagagagaaataaagactgtggatttggggtaggtgggaaactggggaagatctgagagacttgggggaggggagagtacaatcagaatatactaaatgaaaaacctagtttctgggttttttgtgttgttgttgttgtttgttttttaaaaaagcactagtagaggactaggtttcagttcccagcaaccacataagagctcacaacttacatctctagttatggaagattcaacatcttcttctcacctttccaaactctgcacactgtggtacacatatatacatgcatagttatatacataacagtacataaatctttataacagaaatacctcattttaagggatacaacatagcaaggtggttaattatgattgtcaacttcatggaatttagaatcaccatgggaataaaactctaggtatgtctgagtttatttagattatgttacccaccctcaatgtggacaagacaatttcttggacgggggtcctggactgaataaaaaggagagagtaagctgagtagcatcattcatcttcgcttcctgaccataaatgcaatgtgaccagctgcctcccatctcttgcctccttagctttgccaccaaaatgaatcgaacctttcaattgggaaccaaaataagtcctttcttcctaaagttacctttgtgagatttttttgccacagaaacaacaaaagtaactaatacagacacagcagcattctctctcagttccagaggctgggagtcacagataatgattttagaagcgttggtttatcccgaggtccctgtccatgactgtagatggatgccttcttcctctggcctcacatcaatcttacttctgtacctgtgagtatcctgttctctttgtactggctagttctgtgtgtcaacttgacacaagttggagttatcacagagaaaggagcctcccttgaggaaatgcctccatgagatccaaccataaggcattttctcaattagtgatcactggggggagtgcttcaccccttgtgggtgatgccatccctgggatgttattcttgggttctataagaaagcaagctgaccaaaccagggaaagcaagccagtaagtaacatccttccatggcctctgcatcagctcctgcttcctaacctgcttgagtttcagtcctgacttcatttggtaatgaacagcaatgtagacgtgaaagctgaaagggtttccctttcctccaagttgcttcttggtcatgatgttttgtgcaggaatagaaatcctgaataatacactcttcttaaaatgaccatccagagactgcccctgaagacaacaacagctcatgacagcaacctgtttgcaaacaattcaaggagattaaaaagtactcacgaatgtagaatagtgtggtacaagtagtattagtgactcctgaacccttaaagtgaccagtctagggatgagatctgaaagaataaaggcatttcagaagaatcaaatgggaaatgagagctggagtcattggggatataaaaagactagggtgcagttatggacgaccatggacattacctggaccatggacactacctggaccatggacattacctggacatagtactgagaaggttgagaataataatggcacagatgaaagtcttggagctatgatgtgtgttaaagaaaaagaacaagacttggctggataatgagtagagggattgacaacaaagagcaagctaagagtaatttttagaggaacatgagtgttgctctaacccaaaaacttatgttaggagccataatgggagaagctgataactagcaggtgaccatcctgaaatgtcctgcttcggattattatattatctgcaacagcttcagattattatataatctgcaacaagtgcacccttattaagcaaggctgtaagggattcattttaggaaacattcctgttattaatatgcttttcctgttcttattaaacatatataacaatcacactcctttaaagcagatctctgcagatccacaaagatgtacttactgtcttgtagtgatgctatatagacaaatagatgacttaagtcttaatgactataatcctataaaaatttctaaaattataccagtgattactaagctcttttatagtgggactgctattagatccttttctgataatcaaacctgcaatgagaactctgccagtctcccaagtgttaccagttaattgctcttagattgtaaccatacttcctcctactcaaagcacattccaagagggtgtaaaacaattaattgaaggtcatagaaagggaactaatgatttattataggtgctaggacataagataaaatattgactgggtttatctatacaaaacttcactcacaacttagttatggttttaaaccttcagggaacctgtggagctgagacaagtgatggatgtttagccagataattactcctaatggatatgcatgtaaacattctctgttgttaacttctattttaatttatgatttgattttttgagtggacttgtgatgaactttgtaacatgtgatcatgtattctgaaagatgtttgagtgctgaggaaaattagaagagtcagaacagagcttagaagaactgagctgtgagaaggaactgagctgagaagtttttagacagaacgctttttagacagaattgaattcaagaagaacttagaaatataggcatagctttgggagaaaaggcattgagagtaagaacattgttgtatcttcagagcaggaggagagaataagattagaaaaagaatacagagtagaataacttagaaattacaggtaacataaaaaaccaagagagcaatatcagaatgcagagggaaagaggaaaaaaaaagacgctgcagagagcagagagagcaggcaggcttaccatgagacaagcttaaatatctcataagacaaagtcttaagcccgaattccataagaccaagttttaccctccgtggcctcaagaagaacggacaagaaagaagaaccccacgccagggctggaccctggcacacttagactgatacactgtagttcagaaacccccactgtgaaatgactagtcctctctgatggtatctctactatgtacagggcactatattagatcagtgcatctatgggcacaccaggtattacaggtaaatgagtacagaggaatgtctaaccccagttaaatcctgcagagactcaacagtttccacaagtgaggaaaaggggacaggtcagaggagagactcttggtctacctccatgccatgatgtcctgaaacaagaaatggccatacttgtaagacgttgtaagagctgactgccttggtcattctcaaagatacagacctaaacaagtgactgcatacccttctttacttggaattcatcattctttcattttgatgaaaaacaagggatggagtacaggtatccaaggtattctagaaacaggaatgaagttgtttatattattgcagaggaatcagttgggctgtccagagagaactagttcatggaatgctgtttaggaaaaatgagtacagctcacagtcataagacccgtgcagtgagaaaagagtacacagtagagaaaagaaaggagaaacagagggttattttatctttatatatctttgggtatatgtgtatgtgcacaggtcagaagtcaatgtcttgggtcacctttgttttcaaaagaaattcctactgaatctgggactttatgattagctagactggctagccagtgagcccaggacccccctttcctaaatagagttacatatgcaaacaaacttatgctcctgttttatatgaactctgaagatcagaactcacatcttgatgcttgctcagaagacactaactgagccaaattagcaggctgaactatgggttttgaaaatgaaaccttgggctaatatttgcttcttggtgcatggtgagaatgttatacttaaggaaatagaggcccagagaattgaatggtatcatcaccaaggaggagaaactaagccaagattcaacattaggcatttgcatctggagaactttgctaatatgacctagtagcatccttgattgatgctcttaaatttgtcagaaagccagtttcagctggaatagtggtccttccaaaagaattacaggcaggtgaaaacagacccatcacaggagcaaagccctgaaacagaagtgtctaagatgacagtactctctggtgggagagcccaccggcagtaaagacactgcttcaaggagtagttctggcaaaggtccatcctagtcagcacagtttgctccaaatttggctcaaaatggtagaaatggtttttctcttgtgaatctcaggattaacaccttaccccatcttggtcctagggattaaactcatgttttcagatttagaactattatagcattacttacaacagccaagatgtgagacaaatgcctcctgacagaagaatacatgaagaaaatgtggcatagtcattggaaagaaggctaggtaagcacagtacttggtgtacaaacatgaggaccagattgaaatccccagcacccatataaaagctaggtgggaacagtatcccagctatgataatcccagcacatgtgaaacagacagagaatccctgaaataaactagctcccatgactagacaaaatatggtaagctctgtgtttagctagagactatttctaaatatacaaggtataatgaaattgaggaagacagatatcagccctggaccttcatacactcacacatatatgtaccagtacttacacacacacacacacacacacacacacacacacacacacacggatggacaggcggacggatggacacgggcacacatatatacacaaaagatatatataatatcacgaaggcttccagagttcaccccagtgtctacaatagtgcctcccagaccatagtgggtagcaggatcacagcagggataactaaaatgtcagattaccaagccgttgtcccagagtaactgcctgagtaggtgtagagggggctcagaccacactattccaaacaagttcccacttggcaaattggcactctcttaacactaagttaaagttgccactcagacagacaagcaggttaggaagcaggagctgatgcacaggtcatggaaggatgttacttactggcttgatttccctggcttgcccagcttgctctcttatagaaccaagactaccatcccaaggatggcatcacccaccagggattaagcactcccccattgattactaattgagaaaatgccttatggttggatctcatggaggcatttctttaagggaggcccctttctctgtgataactccagcttgtatcaagttgacacacagacccagccagtacattgagcaacaaccaatgctgacatgcttagatgctggctgacttataactggctttcctcttactgttctaaaaccaacactaaaaaaatctccaaggagcctacaaacaatattgagtacatttaattttaagttaattctccattactaactactaatttcaatttcatgttccccacttgataaattattccagcttttttcactatccatattgaattctttacctcaccccatgtgcttacatgtgatcacaacatgaagccctggctctataaagtggaaagaaacttataaactctagtttcatgaagttaagattatatcttggagttgtcagatttaaggaataaaactgtaatatgttctatcagatttgaatttcagatgaataacacttttaggactcaggtaatgcttagggtatacaataaaattaaagttaggtatgcatgtattgtgttggtaaatatatagttgcagtctcggctctattttacctttgtccaatgcttgctttcctgaagatacatggcaaatgtgggaagaaggcaaaggcactgagaggagatgaatgaggctataaaccaatgccaaccactactcacctccacactgtccttgtataagacaaattctggcaaacttaagccaatctgtgttggagtttctgttactagttcccaaatgatttttcacctgatagtcccttagctgcctttctttcttttcttttctttttttttttttccgagacagggtttctctgtgtagccctggctgtcttggaactcactttgtagaccaggctggcctcgaactcagaaatccgcctgcctctgcctcccaagtgctgggattaaaggtgtacgccaccacgcctggctgtgtctcttatttcacctctccttaatgcttcctttactcatttattctttagatcataagacaggacaccggaacaaaggcacaaatcacaacaattttttaatttggctgcagaaagttctaggcactatatttttactctaaccatgccaaatatgcaaatactagtctcaacaataaaagaacttctggcagaataaaccagccctgacctgtactacagagcaatagtgataaaaactgcttggtattggtacagtgacaggcaggctgatcaatggaatagaaatgaagaaccagaaatgaacccacacacctatggtccttgaccattgacaaaggagctaaaaccatccagtggaaaaaagacagcattttcaacaaatggtgctgattcaactggctgtcaacatatagaagattgcaaattgatccattcttatctccctgtacaaatctcaagttcaagtgaatcaaggacctccacaaaccagatacactgaatctaatagaagaaaggggcagggcgggtggcgggtgggggggggggtctcgaacacatgggcacaggggaaaagttcctgaacagaacaccaatggcttatgctctaagatcaacagtagacaaatgggacctcataaaattgcaaagtgtctgtaaggcaaaaatcactgtcaataaaacaaaacagcaaccaatagattgggaaaagatctttaccagtctcacatccgataaagggctaatatccaatatatactaagaactcaagaagttagactccagagaaccaaataatcctattttaaaatggggaacagagctaatcagagaattctcaactgaggaataacaaatgggcgagaagcacctaaagaaatgttcaacatccttagtcatcagagaagtgcaaatcaaaacaaccctgagattacactttacaccagcaagaatggctacgatcaaaaactcaggtgacagcagatattggtgaggatgtggagaaagaggaacactcctctattgctattgggattgcaagctggtacaacccctctggaaatcagtctggcagttcctcagaaaattggacataatactacctgaggaacgaactataccactcctgggcaaatactcagaagatgctccaacatgtaataaggacacatgctccactatgttcatagcagccttatttataatagccagaagctgggaagaacccagatgtcccttgacagagaaatggatacagaaaatgtggtacatttatacaatggaatactactcagctattataaacaatgactttatgaaatttgcaggcaaatggatggaacttgaaaataacatcctgagtgtcgtaactcagtcacaaaagaccacacatggtatgtactcactgataagtggatattagcccaaaagtctggaatacccaagattcaattcatagaccatatgaagcctaagaagaaggaagaccaaagtgggaatgcttcagtacttcttagaagagggaacaaaatactcacaggagcaaatatggaggcaaagtgtggagcagagactgaaggaaaggccatccagagactgccccacctggggatctatcccatatacagcaaccaccaaacctggatgctattgtgtacaccagtaagtgcttgctgatggaaacctgatatagctgtctcctgagaggctctgtcacagcctgacagatacagaggcaaatgctcacagccaatcattggactgagtgtggggtccacaatggaggagttgaagaagggactgaaggagctgagggttttgcagcctaggccagacaccccccctaccctgagctacattggactggactaccaaccaaagacgacacatggaggtacccatagggctggccacatatgtggcagaggatggccttgttagacatcagtgggaaaagaggtccttgggcctgagggcattcaatgccccagtgtcggggaatacgaggacaggaagatgggaatgggtggctgggtggggaagcaccctcacagaggcagagggaggagggatgggataggggatttctgcaggagagacctggaaaggggaaagtatttgaaatataaataatctaataatggaaaaaaaaaaaacaaaaaacaaaaaaacaatgatagatctttctaaacaaggccagagatactatgcagtcagaggtagatgcgtgcactcctggctttcaggaacagaactttaagtgagttagatttcaggccctcaaactatcctcagctggacttatagccaatgatagaattagctcaacaatgttgcgcgcactcaacaggccaggaagaacgacgctgctacaggatccttctgcacacatttattcagtcctgtttcttctttctccatatatctcccttgtttatatctcccctgtttatatctcccccgaaccctgggcctctcactcttttatactctcagttcccatccacgcacagcaggccacgccacctcaccaggcacgcagcttcagctaatcagggcagcaggggcatatctccaccaaattggattcacctgtatcctggtacacctgcgcagcactcaagatgtttgtgtcttatatgaggaagtcaggtgcaagtcatatgacttagctgcagtccctggcgcctttgggactgccgccacacccgctccccacaattcccccttttttcttttttagcagagagaatgtctgtagatagccccccgcagccatgtcccttacccgtccttgggtgacaaacagcattggtttgatccctgtcttaggttggtgacatgcccagggagtcttatcactgactacctctcaatcatgccaagccactcctggggagattgtgttttgcttgaggcaggtgcatcaaaaggccaggatgttgattaatctatggccagatcttaattgctgcaagcaagcctcatgggtgaaggtagaggtctgatccccagtgtgcaagcataggggccctacacaaaaccatcccttaggctcatcacccagagaggtcttggccagctcccgtgtcgtttttcctgggggaagggaactaggacactgaaccttcatggatcagacataccttccacaggatgccaacagcaagctatcctctgtgcagtgcttagcctcgcaccccacggcataacgcagcataatttcttttagagcggcaaaccgaatctgaggagattgtcccgcctccactgcagcaaaagcctatgctaccatggcgaaagtgcgggcccgcacactctgcacctaacacatgtgccaaacacaaaacacacacacactataacaagcatatatcccagggctctcatccctgctcatcttccctgaagcaagggatagatggccagcggggctatctctttaaggggaattcagggatcaaaaagcgtggaaaaatttgaatgtcatgtcgagctggtatcggcttctggaataccgaaaggatctctcatctcggctccatcctttgtgcttgtgggatcatccaccacatccacaggggcaactggatcaggagcctcattcttgcagcgtctcaccaatctctccggcacccaaagaggttccgtctggtcctgtggaaacacacaaacagaccctctcgcccacgtcaacaccagatctggtcgatcctctccaaatctccggacagaaggtccacctacaggtggctgctgaggaggcatagggaggaggcgcagaagctaattcgccttcctcctccgccttggctcttttgttttgtcctttctgtccacctgataacactgtgtctcctttctttttcctttttctttttaagcccttctcttccgacatactttcttgttgctctataaggattttctgacctgtcttgactgcctctacacacagtttcaaacagtaacagagtccatatatcagaacaaacaagaccaaaactatcagacctacccacaaagggtcaatgggagaaaaaagcataactactcagcgaggatctattgatcactacactgaggttatcatagttccttaacttgtccccaaaccgggaaccttaacttgtcccaaagccgggaacctttcgttaccttgtgcctgcttcctggcaactttatgctcacctctattttatccgaggtccttcccaaactcctggggtcccaagtttcactcaccatgaacttaccctgccggcaaccactgactgctgaaagttctgaactcggtgggggagttggttccccgtacgggccaccaattgtcgcgcccgctctcgaccagcaagaacgacacgaccaccagtccttctaacagcagtttattcagtcttcatctctcttctttctcttcatcagtacctttccccagctgaagagttctgaatccatgccgaatccttctcaacagtctgttttatgggaacctttattaaccccttcttccctgtgatgcagttctgaatcctccctgtagcagtgggtcttcgctcttgcctgaagatgtttcttgtcccgggttttcttgtattttctcgtcccgggtttcggcaccacttgttgcgcgcactcaacaggccaggaagaacgacgctgctacaggatccttctgcacacatttattcagtcctgtttcttctttctccatatatctcccttgtttatatctcccctgtttatatctcccccgaaccctgggcctctcactcttttatactctcagttcccatccacgcacagcaggccacgccacctcaccaggcacgcagcttcagctaatcagggcagcaggggcatatctccaccaaattggattcacctgtatcctggtacacctgcgcagcactcaagatgtttgtgtcttatatgaggaagtcaggtgcaagtcatatgacttagctgcagtccctggcgcctttgggactgccgccacacccgctccccacaatttgaaatataaataatctaataatggaaaaaaaaaacaaaaaacaaaaaaacaatgatagatctttctaaacaaggccagagatactatgcagtcagaggtagatgcgtgcactcctggctttcaggaacagaactttaagtgagttagatttcaggccctcaaactatcctcagctggacttatagccaatgatagaattagctcaacaatgtaggtaaatgttggtatcacctagaacctcctccactaaactacgagaaggagctgaagaagtgatcatagtaaggagactgacagttataggaccaagggatggagaggaggagcagagatctggaatgtcctacaaggccaagttcaggtctgctgaaacctgctggtatgctttattatatggcacagcatgtgttaagaaaaaaggctgtgtttctaaaggtataactataggaagggttgacgatctgcctgatctactctgaggaagattcggttggcatagaaatgcaacagtaagggtccaaaagtgccagctcaaaatgccagttggcctgactttcctaggcaagggtttaccagaaccaaagtccaactcacaatgtggcctctctctattgctggttttacagtaatacaagggtgggggttgtcaacataagaaaaggcctaagagtaatgaccttcacaagtctgcctagctttctccttttgctctatttataacaaaacaaaagttccagaacagccttgatgcccaggcagaggtgagtgacttcccagtctcatgagaatcttaaaaagaagatagctactagttatcagacctctaatgtctctcaggttagtactgtgcaaggacgaatgaagacatacccgaggctaaaaactgcaggataataataataccatgtgcttagcatacccagtacctgtttattctgtgccagaagtctcaggtttggtaatgtagtaatgtctacagacatccttagtgtctcaacttggtaaagggataaagttggactctagtaggtagcaaaaactatcaaacagtgtgtgatcattaaagacccctctcctcaccccactcccatcaaaacattgcaaaggcccaaatgtctactgtcaagcatgggaattactgcttgtgctatctttataacatggtactttttccatgtgagaaaaatatcccttgcgatattaacttagcccaagagttcatactaagtaacaacctaggtagcaaagtacaggaagatgagaatgggagagagataaattgaagggtaggtccatatatggtagatagatgtatatataaaaaagctaaataggtaagtaggtattgggtaaataggtaggcaagtagatagatgaacagacagatagactgatggacaaacagtgtctaagctggccagttatctaagctttgcctaaagtagacgttctcaattagtaggtcacaacacctttggaggtcacacatcagatatcctccatatcaaatatttacattataattcataacactagcaaaattaaagttacaaagtagcaacaaaataattttatggtaaggggccatcacaatatgaggaactgtaataaagagtagcagtattaggaaggttctagagaatcattggcctactcatgtttattgtctggccttattcataaaataaaagtaacaagatccaggtagatcaagggtaaactgaatgtagcacagtagaaataatgcacacttcatttataatataaactttaatccttgtcttcctcaaagtgatatgaattacaattaaaatatatgagtatggaacaccaaactgcagactaagcagctgtgtgcactgcagtggggagagggagaaaatgattaactaagacttgacagagaatactaactgtaatcagagaacacaggcttctccaacagcatgggaggagaaatgaactgaatctggtccctctctgtgacagaagggacaactgaggtaagcactagccttttgggagatataaaatatcatcaacacaaatgacagaaatagaccacccaaatgatcaagtggagtgggtcccatcagactatttccacatgatactctcctgcatagtagcacaggaactgcactgattacacctcaaaatgactctgataccaaagagcaggtatacctgttaccttcaaagtccactcccaagcagcagaggatgatgaaaactaggataatccacagcaggaactcagagcagggtggacgcaagacctacccctattatgagcctaagttcctcaaagctaatacataccactgtttctgcctcctgagaaggaatgtcacaggaaacaaatgagctgcagtatataggtccctaaaggtatgtggaagtttgaatatcactttgctgacccattaaagggcatcatgaagataacattctcctgatgggtatattacaagtaagctccttggtcttaaaagattgtgtgtgcccacatgtgtaggtgcccctctctccccctctgtgtgtgagagaaagagagagaaagagagagagagagagagagagagagataaaagacaaagacagagacagatttgtgtgagacagccagagatagagaaagaaagagacagagacccaggaagacacagagcaacatatataacgattacatatataacctatttaaaagtagcaagaaccaggcatggtgcaagattataatacaagcactcaggcaggaagacagtgagtctgaggccagctttggttacatgaaaactcctagggtagcatgagctacatataagacactaagtttcaaaaataaaaataaatgaaggaaggaaggaaggaaggaagggagggagggagggagaaggtaggaaggaaggaaggaaggaaggaaggaaggaaaggaggtagggagggagggagggaggaagcaagcaagcaacaaaacaaaaagtagaagggaatgaaatcaaaaatagagggaggtagttagggaagctggatggctgggtggataggtgggtaggtagcaggttgtagtagccaatacccagaatcccagcatttgggaggtggaggtaggataatcagttcaaggttccatgccactctgtttcaagaaccagggatgggtgataagaaatggtgatggctttgcatttttagacacagtgactaaagaagacttggcaagacaatatttatcagaatttggagatctagagaacaaaaccaagaaatgtaaatacctaggggtatccgccagggttctgacaggaaaagcagcatactacaactgagcaacctgaagagagagtagaatgagaatggcagtagccagaggttgggagatgagaacaagggagggaagaactccttgcagagtcatagttttgtagcaaagagcactttgagagctgcagcacagcacactgactacagccaacagcactctgtcccacatggagaaacagccaaccattggactgagcacgggttccccaatggaggagttagggaaagttctgaaggagctgaaggggtttgcaacccataggaagaacaacaatatcaaccaaccagaccacccagagctcccagggactaaactaccaaccaaagagtacacatgtagggacccatggctccagccgcatatatagcacaagatggccttatcaggcattgacgggatgagaaacccttggtcctgtgaaggctggatgccccagtgtaggggaatggcagggtcgggaggcaggagtggataagtgggtgggggagcaccctcatagaagcagggggaggagggatgggatagggggtttctggaggggaaatcaggaaaggggataatttgaaatgtaaataaataaaatatccaataaaataataaaaaagaaatatgctgagacttaaaacttgttaagtgctttttatctcaaaataataacaataataaacaaggaagggaaaagacaactattgcaggtgatggatcacagattaaaacaagcattttatggtgctatatttatctcccaaaccatcttttcctatgccaatcgtgcctcaacaaagtgctgaaaagaaaaaaaatgaggcagcattggatagagttagagaatcaataattaatcttcttaatgtcattgtgtcagggtgatatttgtctacatgaaaatgataaagcagtcaaatgcttggcttctgtttcttatacggtgtcttgtgaaatcaccttatctatgtaccaataaattcattaagaagaaagtagagtttctacaaactgcatgatatctcctggagctctgaaattgttcaggaagatcggacactgccacctgcatggggtcgtattctttatgagccactcttttttttttttttttttttttgagacagggtttctctgtgtatctctggctgtcctggaactcactttgtagaccaggctggcctcgaactcagaaatccacctgcctctgcctcccaagtgctgggattaaaggcatgcatcaccactgcccagcatgagccattcttgaccataggcaagaagaatggaagaaaagcccagcctcccttccttccctctcattgatctcctgccaggatcctccccacaggaagctggaagccagacagctggtggatatcctccacccaggtctggctgagggcacagagcagggtggagaatcatatataggtctggaaaggaaaagaacaaatagtgtgtaaagaccccaaggctggccagcatatgctaaaggagtagtagttggctggtggtctggagtattgtgactagattgagctgctagcagagaatctaaagtgtcttcatcttaccaaagccccaggaacttgtccgattctcctactgaatctgccgcatgcctgtgctcagcctggtgaaggacacaggcacatgcactacaattagtgggtaaggagagatgaaagaccaagacctttcacagaggaaaggtgggagagggagaaattcaaagagggagagatgggggaaagaaaaggaagggaaagaaggagagggaaagggccatgaaggaagatggagaaagatattacatctgtgtaaacactagagtctttatattcatataacagtagccacctacagagcccacactcttagagttggcttggctgccatcaatctcagcctcctctgccaggaggctgacctgccatgccggtctcacgacctttacacatgctttcctgtatgttgacaataccacctacaactgtaccagtggaaaatcaaatttatttcttgtgtggataccacctcctatctaagcttttcctgatgactctttttggagtaagcatgacagtctgtgtttgcaggacactctttgccaggctccatcacaccgttctacacctgaatttggttttattcatagttttcccatgatgcctcaagattctgaaggcccttaagagcagaactgattgcttttgcctgtgcactcttcattctcaacagtaaaagagcaatgctggcactcatatcttagttgactgcttgtaaggataaatcaataaaagtcatacagcagtagatggcaaactacagtaatttaattcctggtcccagcctctttgatataaaggaactcttctattcttaatataccccatatttctttagatgatacaactatggaattagacaggtgatgagcagcttaaaatccacaacacacttagcactcaaaatgaccacattaactcaatacacttaaacactggtgaacctttttaacatattcacagttatttgcacaggaaaacacatgcctgtggttgcttgtcaaagacggattccaacagagatggcaaatatatctttcaaatattagtttgcttttcaaaactggattattgatgcaagttgccttttctctcttagaattgagaaacctaaggaggatgactggttgttgaccatccatccatccatccatctatgtatatgcctaaccatccattcacctatccatctatccaactatccaactatccatttacctacccattcaactcatctatctaatcagttatccacttgcccatacaatgtacacattcatctacctacccattaactcattcatatattgttcatctacttattgatctaactacccatcccattcatttatacatctactcattcatccacctaactacctaccatccatccattccatctatccatctcccttattactttctttccttcctccctttaccttttgtccttccttctttcctaactgacagacataccaatagaccttaagactatataatagaaacctcaacaatcccagaatattaacagagacaaacagaagtggatacattttaatatattcagtatgataaacaagtgacaaaggtataggaggacaatcttgaagaaattattggcttgtcacaaagtaataggaagaccacagtatcatgtctaagaaaccatgagcatatcaaaagtctcaagaagttgggcttttagctttgatatttagacttctgatccattgtaagttacctccttatagtgtaaaacaatccatatagaattggctcaagtgctccaagccactttagtttgcagattctaggaaggagggaggaagcagtcgtcacgactacatgatgggtcctggacatgcctggactcagaaacaggctgtatggccaaatttcccatgtgtattccacctggaagtgcacgggtcaatgaggctcttcctccttcctcatacagagctatattacaccccaagtaaataaacacattaaaacaggcagcagtttaaaatgtcagctgtcagctgcctagttgtcctgcagggagaaacagggttaaaccgggaagatatacaccaaacacagacactgcaccaccttctcaatgcttagcaataacaaaaggaacttcacatatggattgccacaaaccttgctcagtgtttgttcttgaaggatattctctatccccaacatggctgtgcaaaacagaaaggatactgtcacattatttgggacagttttaacaccagcagggacacatagaaaaaggttcaagttcaaggggagaggattcctgagagaatagtaccacaggggctaaaaggcaaagagctaaacagtattaagggcatataatacttgcagtgttaaagacaatgataaacaaggaactgggtagattcagaatctaggccacagtgagaattaaagtatatacctacagccagataagagggaaaccacataaacatgcctttcagactactataatgtaagatgacctgtcataaacataaagggcctccagacttagtgtggaggtgagtaggaggctatgtggttctttacaataaagcttgtatttcagataataaaattggattcttagcactaatgtcattttcaggtaacttaatgtctcatggatccctcagagtaagaagattgctagtggtatgcaaattaagccaattgaaagaaaaagagccttttctccaagccaggagtattcacaggctaaaagacatagtgaagagattgatcctccaggggtaatataacaatgaagaaagatgtttctcttaataattttggaatggagggagttaatcctccagaggtaatttgggctgaatatgggttaatgctcctctggatagtttggagataaaggctgctgagcagaaggacagtggctgatggaaataaactcatgaagatcactgtagcatacaattgtaaatctatcaaggcaccaggaaactcagatgacccacacagggaagaaaggtgagtgggtagagtagaaggctcattttgaagaggaacttggcaacactaccctgtcctggggtgtaacagaagttagaaatcaattgactttctcaattaccctgaatcagatcctgtttactcctgccaccacgttggacacattcatctagagtatcttgcattctgaaaagcatccagttttatcaacaaattatccaagacatcctaggtactgtgagcaaagcacaaccaaaggaaagtgaaggcagaataagtatcccaccctagaaaactatgcaacctcagcagggcttcttgagttccttagacttcaactttagcatctatcaaatgtgaaaggggcatgtgtgttcctggcaaatttcttggagagttaaatggaacagcatgtctaatgtgctgtgcagcagcaagcttaacatctatccacactccatggatgataaactattgctgacagttggttcaaacaagtaggactaatgtgagaatagatactatgctttcaggctatctctctccatcctaattttctagctaatctctaagcctcctgcctcctgatactccacatcctacatgctctgtttacagacagtcatggacacagtgtgtgataagagcaccccagaacctgggtgctttctgcaagggatttcatacactaagtagcctcattcccttccacttgtggtcctatctagggcttacaatgacagaagacaatgaaggcagagtttttgttgaagaaacctgtcctcgccctttcctctcttgactctcactggtcctgagtgacagcaggaaagattccactaagtaagtgagagaagtaaatgatgtgaaggtatccacagaaggaggttcctaagcttctcacagacatgggtgtagcaacctggagctccacacaggcagcaggagggtgagaagagaaactaatcaagcttatccctgagcctgatgaagaagtatgtatcttccccaatgagatgagacagcttaattactactattaatacagaatcactgaaagtcaaagatggaggcatgtagggaggtggggggtgggatgagagaccttgagaatcaaagtacagaagcataaagggatattcagaaatactgaaggtatagggtttctggaaggctcagaaaccttacagggggctgtttgctgcagcccaacactgaacacaacaggttttcgattttgcttcagtttctagtaagatcacccagcctggttaattaaacatgctggtctctgaggccatacctactatcattcaatgatctcagcaaacaggccccccaccataacctcctcattataaccaatggcagaactctgggatgcctcctctgcctagactattctataccatgtgtgaagactacctacaacataacttcctccttcttcctttgatgtctccagatggctaagtcttcctcctcctgttcaccgaacactttcattagagggggcattttagattgcaattgtgagtctcttgtagagagtgctgctctcagtctgtcaccccttacccatttgccaatcttcaatcctcaactgtggtcctccacagacccattaaactcagaatgaacaagtggacagtggctattatcacttaagaccatcaagaggacagtttctttgaggtcaggagtcatggcttaatcttaactgggtttctcacactctaatctactatcaagcataaacagtgcttaattaacaattatacaatgatcatggagaagaaaaatagagataagagtacccaaagggaaccacaacatccaagaatgtataacttcttagggtaatggtgaaggccctaatcataggtgttagtaatgtcaaagtatcaaaatctttgtctaagaactcacactgaagaaacacaaaaacaaaagcttcagactaggatgactttagttggtcaagcacttgcctagcatgcatcaagccctgggttctattcccagaactgaataaaaccagttgtggcagtatggtggcatgtttatgtaattcacgaacttggaaggtaaagacaagaaaatcaggaattttaagtcatcagttgctacatacaggatttaaaactagctggagctcagggctggagagatagttgagggattacgagcacaggctgttcttccagaggacctgggctcaattctcagtgcctatgtaatggttcacaagtagttgtaatcccagtttcaggaaatctgacctctctccttgcttctgggggcaccagcaaccagacacacatgtagtccatatacatcatatgcaagcagaatatccatatacataaaataattcatagacaatgtatgttccccccacaccacactaatgtcctcattcattcaatgtctatatgaacctttatctgaaatggactcaaggttccaactaccctgaagtcagtcaggcttcaggttgtttccatcttacatggaatgaaaaagtgaaaaagtacaaaagtgaaaatgaccaggaagttttcggttcacacaagaaaataggcaccaccataacggcctggttagacatccttatgtttccattcccaaaagcctgacagtcctcatcaatgagcagcagaatatggacacccaacatccacagatcactttctagtcctcctcctgccagtggtgttttgctcctggcaagtctcatcatcatttctcttaggttcccctttcgaggctgagatggatgatcaacttctctgagcagcccttttctgtcttccagccatgcaaaatcccatgctgtgttttcatggcagaatcatttcactgtcacttctctatctctatgccatctcagtcccatgacagtatcttgttcatctgtctcctgatgacccacaggacgctcatcacagggaagaaaccacacaccggttactctattatgggaaggggcacaagagcagtcagtcacaagcaggtcaggaagtggcaggccttatggtggaaaagagttcagactccaggtcagatgcccactagctgcaacctaggcctagttcaaccaacacccagtactgcatctacaacagggttgtgggtttgggtgtggtgatgctagtgcctgaccaagcaacacagtgcaatcactcagaaaggcatatgcaacagagactcaccatgggtcaactttattgtcctacagtaaacataggaagaatgtgtgggctcaaaacctacaggccaccagatatttcacctacaaggaatcaagtaaaagagcaaagcaagtacataatacattggtctctttatctgattatcatcttccaaaaaaaatctgttaagaaagacaatctatatcaaagcctagaccagagagaaaaagagatgccttcctattcatcaaaaagcccttagagcaggtctatccatgagaagagtctgggagagtgaagcacagcatagagaggcttacttatccatgtcatgccactcacctctgagtgtttatccaaaacatgaaattaatctgtgggtaagatgtctgtgtctcgagacctatctctttattagcttcctctgaacaggctcccatgtgtacccactgcctacggttacttcagaactgaaaaatctgaacaatgtaggaatccaactacccacacagtgctctgtgtgggtcacacattcacatcgccgtagccttctgggaaatgacaatcactgcctggctccttgtaaagttgggaaaggaaagattatcaacattcttcaaagtccctgtctctctccaaagactggctgtagtcattgattggagaaggttacatgccatagaattccaaaatgtaagtctgaaaacttgcaagttgaaaaaaaaatacagctctcctgaagaactttggataaggacattttccattcaaggtgacatacagggaaatagctaattgtcccaacctctatggataacaaagcaagtgggagagatcttacatcaaagagaggtgaggtttagaatctaacccatttaggaagtcaaagaacccaagacagactataatagatgcaacagccctgtttaaatattagcaccctactctctagctctcaaacatgaatcagttactgcttccatttctggttgctaaataagaatgtgtctgggccttacagggcaactgtgaaaaataaagtggaggcaagccaaagacttggtgcttgatgttctatggataaagttggtgattctgtgtgtgtcttgtgtgtctgtatgtacatgtttatgagtttgctgctgtgaattcaggtacacatgttcatggaggccagaggtcattaccagatatcttcttcagttactattttcctttttctttccttttcttttctttttttttttttttttttttttgagaaaggatctttcattgaacccagagcttatcaatttggctagactggccatttggccagtaaggtgcaggaattaacctatttctacctccatcttcatcacaagagtagcagatacacatgtctaaacctggattttcacatgggttaggtgctggggtttataagtagttcctcatgcttccatggcaagtgctgtaccaactaagccacatccctaaccctgatgataccatttttatatttctggtactctgacatctattcaatttcaattccagacattgggccagataaaggaccttaaaatgactgaggaaagtaagcagagttggtcttatagagttatggcttccttgtcaacaaatttaatcaaagccttaaaaaaaatactgaaaaaattgctacgtacgaaaatgcacagactttattttctcatcattcccccctaaatagtgcagtctaacaaccactaattttagtatttaccttatattagatactatttattataagtctttaggggggtgacttaaagactatggtgggacaaacgtaggttatagcaaatactgtgccatttcatgtgagaaatggaacttcagtagaggaggaggggccactgaggaatcaatactctgcggccaccaaaggacagtggtggtcaccacatgaacatgttggactcaagagtaaacaacagtcatgccttgcattaagaagacatgtcactttagtctttcaaaggctctgaagatagccattaagaattatatagagtgccaggcgtggtggcacacacctttaatcccagcactcaggaggcagaggcaggcggatttctgagttcgaaggccagccgggtctacaaagtgagttccaagacagccagggctatacagagaaaccctgtctcgaaaaaccaaaccaaaccaaaccaaaccaaacaaaacaaaagaattatatagagtaaatcattaacagaaaagtacaaaccatttacaagctaaagagtctcagtgaagaccaaggttctgcaggcagaggtgagatagactgaggcatcaatggtgaggcaagcaggcactcaatcagtgaagacatctttttgctgatcagaatggcatgcaaagccaagaggctgggatagggaggggaatcacaataacctacccaaaagcatattcaccagctagccagaaaacaaggataacagaacacttgatttgtcctcagtgcccagggtgggtggaagtaaataaaataggcaaatgtcccaggatattctcatccaggaaatgcaggaaccagagatctagatgttctccttataggacagggctgcctcaaattcttacctacgcacagcagcagaagccaactactggctacaaaggaagaagctttgtgtggagaggcaaggacaaggagggcacagtccagctctgcatgtggccttccattgtctgggctcataccactccttaacctcttctcattagccaccagccctcccacaggggaacaaacaaaacactctgctattccttccagctacatgattggtctctcatttctacctggttcttccgacatgcgacctgtccatcctattaaagcagtactgcccattctcatgcctgacctggccttcaccatgccactggtccttcatcttgccaccatggtttagataccactgttgtcttactattcagtataccatgaatatgtccatgcctcactgggatgcaggtgggccatgacaccagagaaaagaactggtaagattgagtgaggtcagaccctggaaatctcatagacttgagatcagcaggagtctagccacttcctacccatttctgtacctcctctggaacatgtaatcatgacatcccagtgagaagaccatggcagtcactcatataggaaaaacacctggagaccttccctatgcaaatagagcaccacaaacatctcaatctgagccaataggaaacacctgctcctaaatcccaccctactcctcaatgttatatacagtccctacccacatggaataaagcccacaagttatttcactgaggctagtctgagagtggctgtttgactgagctgtaacacttggggaagagttctctctcccaaaccattcattgctggatcttggcctctcctggctgagcaggctcatgcccctgccactggtgtaactggcaccatccttgtagggaaacctcagctacttgtccggcacaggctgcccaaacctcctcacctctcttttgagagctgtgacactaactcttggcactatcatctggacactagtcccgggaagcctatttattccagttctgctttgccctcttggcagacagcagacaacacttcatcttcctgcatccgctagtagataaatttcatgagaaatagggacactctggggtgtgaagtttctagcaccaggtcctacagtgatgcctggctgtgcttgttaaatgaagaatcttgggagatccacctcatagttctgaagcttagtagctgcatcagaaatggttattctccatccctaatggatggcaaggaatgtccttccatatgaacagggaagcccatattcaatagcacatcactaaatgagctcaatggcactaacagggccagcaaaatgcttctatcacatcaagctctgactaccatcactggctgtgctccattcaggaaattcagatttctatgaaatggggtcagtagtgccctctgcaggagccacagagcagaacagccatgctctaaaggccacagtctgcaaagagaaatctggcattcccccaggactcttacctctaatttgttgactagttgaggcagatttgcttgggagcatgggttcaatggagccactagatctgaaatgatgctgggactacgctctgtgaggcatggagctctctcgtttcctgtcaagtagtgagcagcacttttggtttaggaggtggagattacaggtaagataggctgcacagcatttccagggcagcatggggacgaaaaccagatatgtcgacccagtcacagccccaacagactttctatcattctctaaagttctcacacagctggtcccttaattagagtaatttacttttctccaaacatggccacttggcccacaaatggccgaaaggacataaatgacaacaggtacagtgtctcaggtcctccccaaccctcttcttcaagggagtgctaacagggtgtggaaatataaatgggtaggaatgaatgaaggagacagcaagcctaattctgccttcatttttactaaaggttaaagaactggcagagacacaggtgacaatagtaatgacaagctacaaccaggtcacaagaaagctcatgagacagcagtttggtaagcacaaaggcccagaggggctatttactcacatgcaaaacaaaagctaattgtactagctgggttaacatagtgtggaggaaaggccattaataaaggactagaaaaacaaaaacaaaaacaaaaactggtacccactataagactctataccttatgctaacttacctaaactgtacacttgccaatctggactctattcttgaacacaaaacaaattacatgctagaaattgcacataatgatttactctattgcatgtgtgcgcacaaacacacacacacacacacacacacacacacacacacacacacagagacacggaaaagaggaagagggagagcaagagagagagagagagatccatgcatgccttctttagttaccattcaccttgttatcctttgcagtatactcaataaactatttttcctattccaattttcagggtaaactcccgccccttctgtcaatctcttccccagtaccatggtagtatattccatgagtctatactttcttgcctttcacagaagcacaagaagggaaaataaagctgaagttttgtcaaatgcccactgttgcacagctcgtggaatatgcaaactttacatacaactgtatggctacagagatgagcatcttgtacactgtcactgtatgaggggaaaagtatcactaatccaaactcaggtcctgctgtccttctgaaccacatttacctcaaccatctaaaagccctggtagggtctcatctgtccagtttgctggcctgcctggatgattcctaatgtctttttctgcacttaattgtatgagtccccagcagaaacaaagtgcaaatttcattaaaggaataattgaattttctgcttctgctgttggcttaaaataatttgctagccatagaacatggtctgcgtttgcaccaaaatagccccatataacatgtcttgtccttgtttgaaacttgacaataatgactttgaaatgacatcttccagttgcttctatgcatcaagtccttcagataccggagcatgcaggatctttttagacaaggtcaaagtcctctctactcactagttgctgtggtcaaacacttcaacagccctgagcctcagtatattcctctacaaagtagaagttccttgaggaataaatgagatacttcatggaatgcctataggccagaaccagacaaacagtaaaccaaaaagtttcaagcttagaggctaactgaagtagccaggcaacgtcaaccagataccaaagatcgtttacctgaattctgctgtacataaaacaagagtcagggataactcagagagtgacagaggagagaaatatttataaagagttagggatagctcagagaatgacagaggagtcattcataagctagagcatccaacaccctcaaagagagagctaccattcaattccagctgatggctgcaaccatggtgggtataggtttgttagctctatccatttttgttattgtttcctttttggtaaaaggaatgccatacatcctgagttctattagtaatttctcaacatttaaccacttgtaatcagttttttaaaatgatgaaaacagtggtcagaccaaactcaacactattgtggaccattggcaggcaaaccctgcttgctgaaccagagatggaaaaggttactatcattctgatgtccagcggttgaacatctttcttctcaagttctcatatcctctgcagtagaatgtgctttctttcccagacaaatgtgtgtttactgacttatgcacatagcaacacgtattaacaaatacagcttaatgctgatgtcagacagtaccattgttctactactaagggaaaggataccattgctggtagaaatactggtctcatttagaattgataagaacatccattcagaagcaaggttttaggaacaaactgcagatctggaagtcaaccctgtgatcaaatcctcatagtggtaataatgcatatcaagaaggaacagagggtgtgtggttagaacagaaatgttgaatatcaatctccaaagaaagttccacacttaaagagcatttgaatttcaaagttaaacagtgacacaggctcataaattccaaaggtcaataaaatccttctcatcttgaagaataaaaatcacttcaaattcaactatgtacttaactatctcaactctgtgtttctctctgtctctctgtctctgtctctgtctctctgtctctctctctctctgtgtctctctgtgtctctgtgtgtgtgtatgtatgtgaagggtgttacatgtatgcacatatctctgtggatgtcagcgaacaatttccttatgctttcctcgagtttcttccaccttttagaaagggtctctcactgggcaagaagttagccaatacctgcccagagagctctgcctatctctgactcccatgtgagcacaactagatcataaatgtgtaccactaaccagtgtttgatgtgcattctggtgatgcaaactcagatcatcaaacacttgccagacaagtgagtgcctgattcacatgcttttaaaacaaacaaaaaacatacacagaaaagtgattacttcaagtgcaaaatacttagtaaattatcccaaagtgacacatctgtatagtttttatactggaactgtacacacaacaatcaagcttgaaactactgtggtttttcctatacatgcatacacaaagtcaatgcctttttcaacttagctcagtacttcccataacttttgcagtttgagaacaaaatgagtatgttgtaaaagctagcatacccctctttctccttctctacaatttcatggacaggagaactagcatacccctctttttccttctctacaatttcattcttactgtataacatcagcaatgtcaggttaaaggcagcacttccaagctttcctctagcctatccaaactggcagcatcacgagtcctgtttggaacattattacgcacaattagaatgaactgaacaggggctggagagatgtctcagtggttaagagcactgactgctcttccagaggtcctgagttcaattcccagcaaccacatggtggctcacaaccatctgtaatagggatctgatgtgtgtctgaagacagtgacaatgtactcacatacatgcaataaataaatcttaaaaaaaaaaagaatttactgaacaatggctgtgtgattcttcaacagtcaaataaccaagacttctgattaatgagtagataatatatacaatatggatactgacaaccaaagaatggtactcatccttggtagggcaaaccaaagagggacacactgttatatacttcaaaactgatgatgtctagtatcaacatgtagccctgacttgcctggaactcagaaatatccacctgtctctgtctcttgagtgttgagaacttatggtatactgatagtatggcctatcaaatattttcaaatggtttcttgggagtaactgaaaccatgaataaggcaggcactataatcatagaaaccaggctttctaattccattgggatccaaggatccttcaggaaatacaataaatattcaaggtcatttctctaccctacaacagggctaatgtcattttaagatcaaaactgggaatagaaaaagcagagatcatctcagcaaccatctcataacccataaaatggtggaactcaatctcccttaatgagcttaagctttcttagcttaaggcacctgcaagttcactatgggttctgcagactggaatctgcttatcaccattcatatattttcacattcggaaatctttggaagattttgcttaatctcagcacattcctattgtctactagcttgattcttgaattaacaaaaattatcaatgcaccttttatattacactttccatttcactttgcatttgacattctattttcatataacccataatatccttaagaactgatacatttgggccattagttggaaggccaaaatggactttgctgctatcaaacctgccacagagactagccccagggaagagtaaagccatgtctgtgtattctagattcagaaaaagctggcaggatccctgggctgaaggatgggccctgaacatctagctgagtaatcaggcacagttgggcaaactcttgtctacactccatgccccctatctcatggtctatgtgttccaactttacaattcttagttttcattgcaactctgtaaaatggtcaaatgcctggacccttttcctttctgttgaaatttactgggatagctgccaaacacattcagctggtaggcttttgcttcaataagaatagaaggagcagtcaacagaggatttaggaatgcaaagtatgagtacaagctgaaatcagctcagaaataaatgtaactatacaagttcaagacactgcttatacatgaactggaccttttatgctcttgaaggatctgccttcaagtaacacccacaaccctcacttgtcctgactctctggtcaagggaagcatttacactgagcttgttataggttatcacaggcatcataatgaatgcctaaaagtctctttcttccatatgatgtcagttcaccaagagctgaacatctatctgcccctggagtgcagaaaagaaaaaccacaactacaaataaaatccaccaggcccatgagggaagatggatctgggggaaaatagcaaaatggtttcaattaaaatgaaggtgtgcttggacattaccactcaagtccaaaagttggcatcaccaccatattgaaagagactgtagagctgtgcaatgggatctcagaatcacagatgttcacagcaccaggaaccaggagctcctatccctttccccaggcttgagaattctacacaaaatccatcctaactccagggaggaaggtcaggagttcaatggcattcttgaatccacagtaagttcatggttagcctcagatacatgagaccttgcctcaaaaaaaaaaaaaaaaaaaaaaaaaaagaaaaaaaaaaaaaaaaaaaggaaaatgaaatactgtagtaaatgtgtgaaaagaagaatccttctaaaaaaataattattaaggactcataaagagttaacattggactgggcactggtaataagatgatgagatcaacaggcctttcctacaaggaactgagagacacataatggcagagatgtcaggtggactgagaaggcaaagagaggatgaaagtgtcttgaagaaagagcagagtgtacagacaactaacagcataagccaggctatgaaggaacagtgactatgggagggacagtgactatgccaaagagcaagtcaagacagacaagagttggagatgctagctcccaaggtagaggaagaaatgaaaattagcagtgtgaaataagagattaagaacctaagggttaaataacaaaaacaaaacaaacaaaaccccctaccccccctcccccgttagcattttccttcatagcctacttctcatgcttcaaaggactcctgcaatgaagagctcctcacctggtgacctgatggttaaaactggcattctctctctaatgagtcacttcttaatgacataaagtatatgtacggatcctagtttcatccatacaagcatacaatggaaaaagtgcctacttttccatttatagctcttcctaattagaaagactttagttgcttccaaatcagttatgtcagacttccagtagaactcatgtttatgttagtatgccaaccagtgtgtttcatttgacaatattatttcatgtaaaggagactaaagctcagggaacaagggaccatgatccaagaagtcagctatgcttgcctgggcttacttcacagtctgggatgcctgattctgttcagtactttagtcccattgtgtgccttcaggtaatcaattaactaataagaccactaaaccttagcatcaagagtatctgcagctcagaggagattctgagctccactctcacgagacccattgcattgaaattatccacagttgaaaaaataaacaagcccactgaaaatatgaaccattttttccacaaatccatgcagcaatactctgttatttatggcaccagccacgaaaaagccaaagccttaagggtatcagtcagtggggtgtaaggggcattgtgatgattgacaactgagaaagaacatatgtatgtacagaacctccttaaaaggcaatagacagcgtgtatcatggagagatgacttgatccttagtggccactcagatccctctggagtctagagatctcagtgtcagctgaagatcctcctagatgatcaccattatcttaccacaatgaacttctgcttttacatcttacctggagacatctcacatccttcctgaggattacaatcattacaatcatgcacaaagcaatctttgttatgagggagttgacatctgacttctggccatgtccctggcaaaagttgggagctatggagctgtccttattttgtgtcccagtgacagctctgactgctgaatctgatcctgtcaccctgagcctctgtgtctccagggtaacatcccaaactcctttcactgcttcttatataaccaagtagaggggacaatgactttcacctatgtcttgcatgctgacttgtctataggctattcttatagtgcaaagcctagaaataaatgctacaggctaccagtgcttagaaagtgcagacccttagtcttcaccactcggcttagatatttttgctgctgtgtgtgctcatgccacttagcacccaatgaatgcagttgtgagtcagagattcaagtttactcttaaataatatacagacaagtacagcacaacacccaaactaaatattacctttattctcccatttctctaaatttccttaacagtcttgaaaatcattatggcaaggactctaggcacttcattagctatagtttgaccaggtattttgatacttctaatgggtctttaagctgataccaaattataaatacagacagccacaagctgtccacaacttagatcttctctttgccattaggggatgtattccttaccagtatgtgaccagaaaaaatatactacacagttaaagtgccaaattatttttttttatttttagttatttgtttgtttaatgtatgaatgctctgatgaaatatatacccaaattctgaagagggcataagatgcttttatagatggtcatgatatatgtcattgctgggaattgaactcagaacctctggaagagcagccagtgctcttaacctctgagccatctcaacaactccgtcaagtgtcaaaatcttctctagcctctgaatacagtgagtgtattttttatgctgtggtttcaaattaagtacccaaaggtaatccagcgagaggcaatgctctggaattaagaggaagagaaggacaggatgcaagtcccaaatgtcatccatgtaggaagagatctctgtaaagaagccaatgcagagatccaaagaaatgtagaaagatctagccaacaaacgatatccgagcaacctgacctaaccctgcccatagcctagatggtcgttaactcagtataaccacttatattatttacttttcttattgctgtggccaaacatgtgacaaaaaacaacctaaggaaggaagggcttagcatggatcactttacctagtgctaccatggcagagagacatggcagcaggagtcaaaggaggctggtcactttgaataagaacaagtagaaagatatgaatgctggtgctaagcttgctttctccttgtttattcatcccaagatcccagctcctggactggaccacccacattaagggtgagtgagtcttcctaggaactccctcacagacacatctagaggtttgccccctagatgattcttgatcttgtcaaattggtaatcactaaaccatttcattaataaattattttcccccaaatcagttcagactgatttatgccactgagcataaaccaaaattctatagttgtattccccagtgttagaccttgcatgttatggtaccaacttgaaaagaaaggggttcagtagcataagtgaatggcaattaaggcccagactcatggatgggaagggtattgaggacaagtgattattgagtgttcagcattaaacagggcatccatactatccctcacaattatcaaggaatgtcacacaagagggattagaaagaacctaacagctgaagaatagagaaaaggaccatgaacaacagtcttatgggcatgccatagccatgaaactcatgaattgataacagctacaactgcctacgcagagtctacataagactgaataagtaaactcattcatagttgagggaggggctcatggggccaccacagagtgcagctaatgacagaggaaaactactctatagaggagatgagatcattattgtcaccaaagcagcctttggtgagttaccatgctctggtggacagctttgcacccatccatgcttatgacagcccaggacattatgaagtaaaagcacaacaacagatgtaagtgggatgaagacttggtgagaagagatgggggctactggagatgcctggacaatacaggagcgtagagagatgaagcataaaattatacacaagcataaaatggtcaaagaataatttttaaaaattgaaacaaaattctacaaccttactgtataaagaccatgtggtatctagtacaattcctcgataaactccaatacttccccaaagccccggtctacagtacagtatcaaaataaaaccttaagttcttgaagctaagctgttctccatccagactggctgagaggatgtgttggccaggtaaataaagcttttacactgcatgctttccacttttagaacagtaacattcactgaactataagtaattcgttgtttaaaaagaaaaagattctgtacaatgtatgccacacagaaatggtaacaataccagttgtttatattgtcaatgtcatcattgccttttaatatatattgatcacatgtaccctaactctcctttctatcccttcccagattattatgctattattactagcagttttgctgtattgccaaaagcccgttttcccttttattattatttttctttgctgtgctgtgccatgttgcattctgctctgctctgctgtggtttgtggcagggtttgtttttataaaagtatcattatgttaagtgatgctaggctggaactcaaaagttcttttgatttctactcaggatccagagtactggaactttaggcacagctgccacgtccagtcatgtttttatgtcaagaagtgaactagcgttgggtgcctctgtttctgttacaggcccctctcatgctgactgagatgagaaaacttttctgctagctttgtgagaattaccatcaactcaccaacttccaggtacagaaaggagtccatcactgccagagtagtttaacctactcagctgtttaaatgaaatctgaaaagtccagtgatatgactaagaggaaggggagagtgacaagggtgtgacactgtgcccctaccacaggattggcatttagaatcatctccattctaaggttcaggatcaagtttggttcccagcacctacattaggcagctcacaatagtctgtaactctagctcccaggtatctgacatctctggcctctgagcatctgcactcaggtgcactcatgtgcacaaactcatatgcagacatacacacacataattaaaaataacaaaatctttaaataaagaacaatcatccctgttcagcaagtgtcatctttatattcaacctcactaacacaagctcgaaatgtggacccaagtgcctaattaaaaggtagccttgagatgtcaataaaattatgcacaaaggaaatgttcaaaaacacagtaccagctttgttgagtcagattgttatataagtcccccaccccccaactcaagtgtggagcaaatttaaaaaggaagtctacacatctatactaccattgcctccattcctgaaactgagacacagtcaccaacaatcaagacactatactacattcaaaattgctgactgaaaaaaataatgagtcttgtatttcctgttcatttttggatagtggcagcaatgatcatttgcttttaattgtgcagggaaggcaattcctatgccccatccccaagctctcttgccagtttgaaggatcatctttcatgcacagctacagcctaactgcgcctacaaacctctcccccagtacactaccatctcacgactgtggtgattaacctgtctgtctccctcaggagacagtgtatgtctagatctgttatctttgaattctcagcaccggatttactgacgatgtcaccagcaagaaaccattcaatgtgtgaacaaacaaatgactatgtggatcaataaatgaaatatctagcttaaggaaagtcaagccactcaccaaggttcaaccttctccctgtgtttacacagaagtcatgtgaccaaacaggctttgaacatttgtatacctgctccctgccactaaagaaacttatattttagagtctagttttttatttcaatcctcaccttgctgacttgcgctaaatacctctgggatgctaaaagtcatttatcatgacgggcaacagtaattcagtatttcacacaaggaacactagggcttccaggctctttctaggcctctgtaacaacctggtcccttaccctcccccatttccttttacttggtttttgttcttaccttcaaagctcccagcaaacaagtaaatccaggtgatggctggtatgcagagtagagtcaaagaggcagccaggaatttccttctccctctgcagattcccagcatcctctcagaagtgccaatctctaatttcaatgtggtgtctctgtgcagagcaagaattcctcagcatccctcataatactttctggaagggaaaacaaagaaacagagctaaataccattgtgatgagcaagcagatggaggaaaacaagaaaaaaaaaaaaaaagaaatatcccatagatcctaagaatagattccctggctcatggacgataaatgatgctttactttgtacatgtcaaaactgagacacttaaataaatgatgagatatacaagggatctaactctgtcacacacagggagagagagagagattgagtgagaaaaagagagagagagagattgagtgagagaaaaagagagagagggagagagagagaaagagaaagaggaagagaaagagaaagagaaagagaaagagaaagagaaagagaaagagaaagagaaagagaaagagaaagagaaagagaaagagaaagagaaagacagagacacccatacacacttaaaggagcagttagctagcatctattataaaagtactaacctggtatgctatcaaactaggacataagctgacttcaaagaatacaaggactaattaaacaatatgattcgcccaaatgtgacaattgaaacttatacgaccactgatgagccatgtacagtcaactggcaggcggtttctgtgctcctcacagagaggaccacgaaaggcacccggggcagaatgaagaccacgcttaaagccaggcagcttggttaggtcacaacataacctgttgaaactgtaccatggtcagccaagaatttatgattatctcagttggaactgtctacatagtcccctattgtggtggacacagaaaagatagaaattatcttgagaactgacaagagctaaccaacttggactgggataaatgatctttaaaccagggggaaatggcagtgatgggttaaaagaaaacaaagttgatgaggatgaagtagagagcccatgatattgacatattaaacatagacacagacacagacagacacacactcacagtcttgctgcctgctgttcctgctgtagaaatcttagctacctctctagcactctgtctgcctggatgctgccatgcttctcatcatgagaataatggactaaacctctgaatagtaagtcatcccaaattaaatgctttccaaaacaaaagttgctgtggtgatggtgtaccttaacaaaaacagggcactgactatgacagaagttggtaccaaggactgggatattgctgtgatacacctgactgtgctctttgggggaatgcaggctttggggctttggattaggaaaagagttaaatgctttaagctggatttaatggtcatactggcagaagagagaaagacagtgatgcttagagtgacttgaactagttcaagaggtttcaaggaagaagaatagtagtacatgacctagcaaccattcttgtaatattttggtaaagaatgtggatgctgtatgctcttgtccaaaaataaaaagtgtgtgtgttgtttgtttgtttgtttgtttgcctgaggctaaattgaaaagtttttggattagtagctttggcagagataaattccagacagccttatattgactgttgagtggttattactggtcatgattttgcaaatccattatgaaaataagcaagctaatcaaggaaaaacacaaaatgtacagtttgaggagaaaaggaacatcaggaatttttttttttttttttttaaggctgatgttaaataaaggaagtggtgaccttagggcaacaccctacttagctaagcttccaatttgggtaaaggaattaaagaaaaatttagggtttgatgtgctggcacaggcctttggttgcagcactcaggagacagaggcaggcagatctctgagttggaggctaatctggttttcacagaaagttccaagacatccatctcctcctgactttagcttatgtcaagctgacataaacctagccagcacaatacctgtggacccaggcagcaatgtatgacacttgctgaacacataaaggaatgtgccctcagacacatagcttgtacttagtctaggattcttttttttttttttttctagacagggtttctctgtatagccctggctgtcctggaactcactctgtagaccaggctagcctcaaactcagaaacccgcctgtctagtctaggattatttaaatgtgtcctttttaaaactgaagtctgctaaccagttgtgtaatataagaaagaaaatttgcagagtccctcaagaagaccctttcagcaatgatgcacccctcagacactctccatatcatggaaggtcaggagcaaagtttattttggtaattttcttttgttctctgcctgcaggaaagaacacaagtgtctcacaattaacattaagtctggataatgtgtacattacagcctatagtatctcctcctgcagatagtcctcagcctaaatgcacatacaatatgcatagaataaacactgaaacccaggtagtccttgtgttgtataggccattcagggctctagccctccagattagtttgccttgatcctgctctttaatctagatctctggctatgcggaaccactgtgatatctcaggtcaacaacaatggtctcccttggcttccaaccaagtttctcttcacctatttttcttcacatctgtggctcaaacatattcactctcaactgagaattccacccatcttgtctctgccatacaaaaagcaaagcataagactgatctgcatttagcaaaagctttcacaaggcacaggagtctagaggtgtggttcaagtgctggcttgcacctgatagctaccctggcaaagccattaagatatcctgtgccctcagcagtttgatgtgagagtccatggcaattcaagtgcagctaaaaggatccagggggagaaccaatgaactaaaaaatacactgaaggggaaataatgtgagacactgagggattaagattaaaattgattggttgtattttaaccacttacacaaacaaattctagagctagaaagaaatgaatgacttcttgctctgatagctgtgaatcaggagggaataaacaatatgagttgtgggctgtacagctgcctcctggcaacttcttagtagagggaaaattactaaagtggaaaaaatgttatttcacctggagaagagaagtagaaacccctctgaattcatcatttgtatgttactactctctataaaccaactatactcattgtttaaaaagagactgccctgtgaaaaaactcagttattatacttactccacttccttgtcacaagggattaaaatgtggtttaaagatatcaaatggaaaattctacaaagtagttgtgatggtttgacactgttgacaagtgtaaccttgttggagtaggtatggccttgtgggtgtgggctttaatacccttgtcctaactgtctgggagccactattctgctagcagccttcagatgaagatgtagaagtctcagctctgcctccactatgcctgcctgaatgtcgccatgtttctgtcttgatggtaatggattgaacctctgaccctggaagccagccccaattaaatgttgtcctttataggacttgtcttggtcatggtggtgtctgttcacagcagtaaaaccctaacatgatatatctcagtgatgtgatgaactcccaagccattccatcctactccaagatttatatgaataatcctggaatcctgagtatatgctacctgtctgttagtcaactaccaaatgtctcagttattagatcaatcaagagagaatcttagcagtgacgccaggagacagagactagtttagttcagacagaaaaacttgtaactttcattctcctggagtaattgttgtctccaaggattattgcctcagtctcctgacttgggcctagtcctggcagcttctagcctccctatcatcttatctacacctagaatgttttcagcctctgagacttactgatgaattacaagctcaccacttgctagttctctctgatctctgactggctggtttaaagcaacagtctcaggaatgtctgcgctagaggccaggagtgccagagcaggtctctggttccttatctcttgtctctaaacttctgcctgcatcaagatgaaaataatgtaattccattctgggcattaatctcttttggtgaacagctttggaactgaatctctggatattcatgatggaaatagattgtgtctattcacctatgtcaacccatatcctactgatgttagactctccaatctttatctggtacagttaccatattattaaaggacactagggataacaaggctctgttgaggcccattaaagaaaacccattcctcttggtcaaaggagtaaaatctacctctggccttgggtagagtcataactttcagattggccccaagattagcacaattcacactactgtctaatccctaaagctgttagtctagttagggcgtggagagatagcaaagcagttttgcatggctcttacagaagacctgaattcagttacatgcatccacattcaaccagctaagagttcagctccaggagctgcaacaccttattcaggactcctgcactcacatggatatgagcttgtgcatgtgcacacacacacacacacacacacacacacacacacacacacacacacacacacacttaaaaatgaaagaaatattcattaaaagttaatctacttgggcctatcagtcatctggccaagggatcatccctcagaaagactgccatgctaaagagataatcaccccttaaaaaggatgtagttttccttcccagaatgcctagccttggtgaaattacaaagccaaggccacacagttctgttaagtcagcctgctttctgagctgtaatgcaaaagaacctcatttcttttccttttccttttttttatctctttcctaagcctgctttccctaacgttaggctttttcaccctctatgaaataatccgtctttcatcttgcagctgcttgcttacctgtactgctcaacatggaggcctagctcaaaagacatgaccctgtctcttcctgttctccataaccctcatcctagacactcctgaaatttacagcttgcctgtcatgttgtttctaatcaaatggtgctctacctttctaccgagtcagtttttaaattttcttattaaggagacaagaatacaaagaagggatcctgatttccatggtaacacagggctttgttcaaacaatccttaagtggtaggctactgctcagtcacaatgctgtcactcactttactccatctcattatacaggcattgtattatctcacatccaaagacagacgaaggagagaggccatatccacaaaacttttatcgtaatagatggctgtaactgttctgccactcctggccattgttgttcttctactactacacattttacaaattagaaaccgccatagctctatgtgtaacagggaaaatacacatgggatttgtgctatccattctctaaggcatgcacttgtgtcttggaatgtatgggctgtggaccaactgggagcacagaaaactacatctcaatatttaatactaagaaatgactcttcctgggatgagataacttctcttggaaaacccactctctttcctacattccttgaaaagaggctggcagtgggggataaaaataaaatgggagaaaattataattgtaaatagtttttacctcatcaggtatattcaaaacttatcattttaatatacaataaatatgaataatttccacacattgttttacatccttttctttatctatgctctttgcttatatcaagggcacattttcagagttcagtagccatggctcacagccagcgtgctgcagagtagtgttccgggatgtcctaagccttcatgctagagtatagaaagaggaaagtgtaagtacagatagccgtggagttaaagcagaggatccagaagactctagcaatgtaagctagataaacagcagcagtagaagtcaaaacagaagtagttatgtgagagctcaggaaagaagaaaccactagacaagtgtgatatatatacctgttggcatatgcacatggtcctaattcattgactttatgacccacctataagactccacttatacagaaaggcactgggactcaatgaccaggcatatagaagatgtgttgtttccctcttccctcccttcccaaatgctgcccggcctgcatgctagacttccccatgctaactactttttatccacacattgttcttgattgggatgtggttctaattcctccctcaaaatgacatcagacagcatcttaagacaactttgatggtcagattaggaaagagaacccagtgagtagagatcaaggctgcttaggaacaccttatatggcacagttcagacagacctacaacaaggaaatttttcggaaaaaatgcagactggacagaaatgaacagtcctagtccaaggtgttactacttcaggaagatccttccctcatagggacgatcaaaggatgcttcagatgaatacatgtacagaaaacttaactcctcacttgtctttcctctaaagtaccctcccctgggctagatttgtcactttgtatagcctgggttgtgttttgttggggcaagaagtacagttatctgagtcagacagcatgaatactaaattctggtacagaaatacatttctgtgatgacataagttaaacaggctcaaagaaataaaaacatccatttctaatgttaatctctttcaacaatgtaccaccaaacagacctctaatgtaaacagtctctccaagcacagaaccttatcccagcatcagactgtagctccaggaaagtggagttttaggggtttttctacatgtctatgtttaatcagtccctactcaaaggcccaggaatgttttggtctttattcttgatttttttttcccattctggaagagggtgtttaagcaggcaggcctcacattttcattcttctggagtaatacctaaaagctttgaacaagggttgccacaaagaagaaaagaaacactttagcattcctgacagttgaaggagttcctggtgtctgactggcagagtctctagttgactggattccatggcctttggaaataatgatccccatgggctgatgggtataaagaaagccactatttcttttgtcactcatccacatccacagtcggatgacacgcctggctcagtgttttctagtccagtgctgggcctgtactggagataaagagctcaatacattcgaaaccatattgtttaggagctttaagaaaaaatggacagatgcacagacacaagtcagggacaataaaagttccggagaaaacatctcagcagcaccacagagcagcataatttcagaaagcaaagaaaaggagaaaggtccatggtgaggataactataaatatctaggactgagggcaggatctgtcctcattacagacatgaaagaattaagaacattgtgggtatgccaaaaaggctccacacataacagtggattggtaagcacacagaggagccagaagcatggatcagacatcttctaaggttgagttctcctgatccccttctatcagccgggcctcatttcctagagagtccacaatcttccaaaggagtaccaccagctgagggaaagtctcaaggcaccagcttatgggaagacagtttaaatacaaaatatgactgatactatctgtgacttaaaagatgaaaaaaaatgtgatgatcagaggatacatttctaaagacatctaatagaactcctcctccatgatcattctcttgcttaatagagattctctaagataaagatctatctagtctattagtggccagtcctgtgctgaaggatggggcctctttaagtctggactcatcttaaagcaatagcattctccatgcaaggactcctggcaagtccttagcaagggaggagtgatgacaccataaggtacttttaatatacaaccccatgaagcttagtatacctgttgtgttgcataagcaccacctttggttccaaatatgattcattagttcgagaaaagatccttcaacaatttcatacttctctatatgttaatttaattctcgttctcaagataaaacatactgactaaatgcaactcagagaggaaaagtttaattggcttgcaatttaaaaccacagtcaattactgaggggaaatcaatgtaggaactcaagaagccaatcacatctctagtcaagagtagaaacaaatacacccaaactacctacttctgttgctttcaccctgcttcctcttgccctttaaatttcaggactgcctgcccatggaatggtaccacccaaaacaagctcgttcttcccacatcaattaaccatcaagacaacctcccccaaacgtgcccacagactaactggatctaggcagtctgtcctttaggtttattccagacgattctaggttgcagcaagctgacatttcaaagtaatcattacattcatctcgccttccctgaaaaccatcacttttccttttgtctccatagatttatcaattctgagtatctcatacaaggggcatcagttagcacatgaccttttgtgactagctcttttcagacagcacatatgcatacccatcgatgttctaacatggactggcatagcattctctctgactagtcaagagtctaccatgtgtacatatcatattctactgtccactcactcgaatgatgtcatatttgagacatcccccacctcttaaagtgaataaaatggctattaacatctgcctaaccacttgcttaaaattttgtcaaaattattaaaatcaaaagcccttcactctacaatgaagttgtcttcattgctgttgatgaattaaaatttctagaaactgtaacataagtgatgtagccaacgctggctatgtggctaagtgcttatttttaaacagagttaggtcttgattaaatagttgataatgtaggatatataaaatcttccataccttttagagttgattcatattttgattttgtaattgtcaatgctaacaatatttgtttcagaaacaccacataaagaaataaaaatagggactggagagatggctcacaggttaagagcactagctgctcttccaaaggtcctgagttcaattcccagcaaccacgtggttgctcataaccatctatagtgagatctggtgccctcttctggcctgcagtaatatacacaataaatcagtaaatttttaaaaaaagaacaaaaatatttgtttcaaatataccacaaaaatggcagattaatgtttagggccattttgggaatcactgcaaattctttcctactctcaaaatcaaaacttcttaaattattgttttaaatgtgtgcaagtgttttgcctgcaggtatgcatgtgcctcatatacgtacagtgcccccagaggctataataatgtgtaagatcctctagaactggagttacaaacgtacagagccattaggtgggtactgggaactaagtctgggtcctctccaagagcatcaaatacttgtggagccatctttccaccccaacttaaataagttttaatgaaactccagtcagcaatgcaaagagccacttcaaagaatcaatcactctaatatatcataatgttaaaatatactaatacagagaaatagaagaaggaacatattaaatgtctttcctgtttctgtatatgttgtgtctgtgtactggggtgcatgtgtgtgcacgtctgcagaaatgagaggtttaccttaaaaaaaatcatttctcagatgttgtctaccttgtttattcacacagggtttctcactaacctagaactcactaagtactccaggccctatcatacaaaatagagacctacctaactatttctcctcagccctggaattatagacattttcacatagattctgggtgttgaactcaggtcctcatatttgtatggcatgtactttaccaactgagctctctctccagacccttacaagtctttgttttctattagtgaacccttgtgcttctacatctacatgcgtttctagtagaaaactctatgtgtacaataaaacactaattctgagcacataacagtctctaatcaatctgtaccatagtgttacaagcagcatcccttagtgcttcatgtgggatgcttgaaaaacagtttatctcagctcaagaggctagaacttcaagatcatggtttgagcaaaccattcctgaccaaaagtgctagaggaagccctgccccaggcctctgttcagctgctggcagtttactcacacccgctttgtgttcaagcctgtgtctctttagctctcgaccaaaatttgagcctaacccagtactacttcatttaagtaattacatcttcatatgcacaacatgaacattgtattcaattgctgaattgaataattcctattataatacagataataatttatattactattagattcaataagtacagtcctaattccaaataaaatgcaattggggggggggtatctttacctgtaacattataccaatgtgttggtggttagttctaattctttgtattaattcagctcccaaaagccacacttccagttgctgagggctcctgcccccagctgactttgattggtaataaagaattgcaatatagccaatggctgggcagggagatggagaaaggattttgtggacaagggaccaagaaaggacagacagaattgccatgacgagggagcaaggagaacagacttaaaagcccgaaaacatgagattccaggaaagtggccctataggtcatttcccagattgagtctgagggagcagatataaaatatagattttaaaagatgttaactcaggaatattggaggggagtatatgatagctttggggaggtttagaagtgcccacaccactgaactaatcaaagcatatcaaaattagctggcgagtgtgtgtgtgtgtgtgtgtgtgtgtgtgtgtgtgtgtgtgtgtgtttcatttgtgaatccagagctcttgggcaggagcagtgaacacacaaggaaccaacatggattaactattcactactacataccaatagcaaggaggaaaacccccataataaagagaaggagagagggaaggggaggagagaagtgaaggaagggggacccagaggtgaaaagaaagatggagatttaaattacattgagtcacctgctcatggagggcaggaacgacttgggcagctgaagagtggatggagggaggaagggggctcagaaagattacccaaattccctctaatactccaaaggaagaagaaacacgaggcagtcttcaggagcactcagccaccaccacaccctgtggcctgactagacactcctcttctttaggctttggcatccaaattcagcaggaggctatataaatagatctctggcaccccagcctgagcacttgcatttcccttccagaaaggatccagaaatataagccactcttctgcagagctatgcatgatttagagcaattccagacttttctcagagctgagcaagcactagctgtcttctgctaccttcaaagtcagaaatggagcctcaatcatgctgatttccaaagaaacatcaattttttttttcagtaatatctcactcatgccacacagacagatgaggcccagtcaacaacctctttaataagtgctagctcattagttataagactgtgtggagaacataagagctgtaataatacacccacctgtccatcataattttgctgactttgaaaattaataaaaggtttggtttccaataactgtcttcctttagatgttgtttgatacccctgaccacttgaagagaagaggataaggtaaacagctccttttgcagcatttgcttttcttttcttttcttttcttttttttatttattacgtattttcctcaattacatttccaatgctatcccaaaagtcccccataacctcccccccacttccctacccacccattcccatttttttggccctggcgttcccctgtactgaggcatataaagtttgtgtgtccaaagggcctctctttccagtgatggcggactaggccatcttttgatacatatgcagctagagtcaagagctcctgggtactggttagttcataatgttgttccacctattgcagatccctttagttccttgggtgctttctctagctcctccattgggaaccctgtgatccatccaatagctgactgtgagcatccacttctgtgtttgctaggccccggcatagtctcacaagagacagctatatctgggtcctttcagcaaaatcttgctagtgtttgcaatggtgtcagcgtttggaagctgattacggggtggataactggatatgagcatttcttttcaaatctacaattttactctgaaatgttctacaaaccagtaaaggcaaagcaggaaagacaagagagtatcagagatccagctccaaacaattaccaagggcacttctagctgaggtcacacgggacaagtcattgaacaaattttacatgaacaaatttcaaggactcagcccggggagccaaaattcacctcacacagcaatggcatccaagtctttcccatgtgccaaacactggcccaagtgattagcattacagtgatttgcaaaaactgtcttagtagtcttcagggattcatgcctggaaccgccccactcttttacacaagtacacagcataccaacagaagtaaatatacacagtatatgcattattgattggcatactcatatagaacactgaaactaaatatagaaagcaacatcagccgtgagggtgagagcaagcagccaagtgctgtaaattaccactgacagcgcctggacatattcatgaaacagactgaagactgcaagatgattacaccaggtctcaaagtgagctgggtatgggaactcctcccatccaaaattacttatgcaggtgggaaaacagactcacaaagaaatgtcctgaccagttttccagaatgcaaatgaaatgaatctaaaatctaaggttttgagttcttcatttgctatttctgactcagaaatagcaaaattagcaaattaactctgatttttaaaagatattttggagggagtacatcttttaaaatatattttgttaattctttgagaatttcattcattatatttgaaagcactcattcaagatcaaaggaagaaaaagtcttcaagaacctttgagtctatatttgagaaaaagaggccagggaaaagggcggcaagaagagggtgtgattaaagcatacttacatacatggatgaaaataaaatgaaatccattttcttgaatattcagtatgctaacacagtgttaaaggatagtatataaaaagcatttaaaatattatagtcagaaagcacagaaatatggctaaggaaatggctcagccaggaaaatcacttgccatacaagtatgtggagcagagtttgatgccaataccatgggaagagaagcctagcacaatacttcatctttgtaatcacagtgctggggaagcaaacaggcagatccctatggctcactgaccagttacctgaactggagtggtgagacccaaaacccagtgagagatctgttcttacaaaaagcaaacaaacacgcaaaaacagtgatggctccagaggaacatctgagatgggattctgacctccaaacacatgcacacatgagctctgcacagataaacccatgtacaaacatacacatacacacacatacataaaaaagagaagaaatgagaaagaaaccataaaactagaaaagaggaaacaagactgtaaactctttatggatatgatctttaagtcatacagacatgcacacataattaataggtacatgcaagcagtgaactttatagatccatatagtacatagtatatactagatataatataagtagcatctgtatgcataaaaataaacatatatgcaaatcattttacttttaatcatttccttcaggaatcagaaaacagatgtatacagcatcagactataaagatacttgctatacacagatgaaacatcctaatccaaatatcccaaatgcttaaaaatatgagtgttggtgtgataacctgcctttgtatcaggaagagaattactacaaaacttacctgtaggctatatgtatatagtatgtacaaagcaccaaaatataaattcacctcctcacctcctccttagactcccccacaatggagacttcactgtttatatgcaaatatccccaaatctgaaaatctctgaaatctggttccaaccctgtcaaacaagagctctttatcctgtgattggtcaatctctatctgatgattaagcctgctcccctatgaagccagaactttgaattctctacaacagtgatttctccagcatctaaagcatgccttggatgacatgctgacagcctagacactgggcacccaagataccgagaaaagaggttcttaagcttctacctaatcaatcagacaaaaagaaagggacatcaacaacagtgtgttcactaatcgcagggccacctggattaggagcctgacagtctgttcaggtccacaaatacctttaggccctttgtcaaacaaaatgagtttgtctgccagataagagctcaattttccaacttcatttcagttgatgaacataagggtcacctggtgatttcataatctggccctgatgcttgtcaaagccacttaaaaaggagaatgccagttgtcaaaagaaaagaaatgctaatctaatttgtacactacttccaagcaaacaaagaggaaatatttacagacatgccgtagacgtcctcataaccagtgtaggtaaagaaagaagtcaaacactgaagagactttccaaactgtttaaagtatgcccagttgtaagtcacaggcaccaatacagtgcctggaaaccaagtcttacaactgcattattatttttattttttaatctagtaagtaggaaaaaatgcttttaaattatataagtcacgttcattaagtaatgagatgatcttaagggaggctcaatatctaggaagtcaagggagcagaggtagacttccatgtcctaacaaggcccatgttagcagatcactaatctgtatttttcctgatacactccttttatgatgtaggagaacacaaagactcagatccaaatgtattaattggacaataaagcagtcacaatatgaatctctcccaataactcccacgtacagctaggaaagtgatgtccattactgtctctgaggccaaagggcaactctcttttgaagaattcattatatttcctacttcacagcccttggtcttccatctcagactccccccagcagggagaggctcctggggagtggtaatgaaaaggtagaaaagaatcagaggaccctttccctactgcctcagagggtatctgagcattgtattccttccagatctttacctgctttatctgcttaattagcattgccctctgggtctcacccagctcaattgcctcaccatgcaggaaacctttcagtaccatagccacctacagcacaacttgactttttctggagggttatccatttgtcatctggttttgtttctatgtggtgaactccagcagaagaggagagacgctgccttccagtcagatgaataaaaaacacattttagtttccaaagaaaagaaactacttgtatcttctgctagattcgaaacaggaattatggaaaaatctttaaaatttctaatttactagtcaatgcaatcaagtcactggaaaagcactagggaagtgagggtaagcagcagttagactggtgacctaaatcctatccgtgaccttaatcccagcaagacactgagcaggcaaactttctgcttcccacaacttccatgaaaacaggtcaagctgacatgcaaacatttttttttaatgtgtcctttcagttctagattttcaaatttctgctttgacccagctataaaacaatacacatttaaaacctatataagaataattatgaagaatgcttttctgaactttttccagacttgaggaaagccttcacacgttgtatacagctcagctccacctagagaaaaccagatacttaggtcagttttgaaaatgttttatatcttgctgggaatgatggttcatgcctttaatcatagcatttgggaggcaggtatatcttagtgggtttgaggccaaccgtgtgtgtgtgtgtgtgtgtgtgtgtgtgtgtgtgtgtgtgtgtgtgtgtgtgtgtaattcttatggagttccaagacagccaagactatatagacccagcctcaaaaaacgcaaaggaagagagagaaaagaaaaatctttataactcaaagcaaaggcctcaatgagaaagtgagtctcccatttcaccactttgtctcagcatggtgcagataagtccttgcaacttctatcactgtgaggtgggggctaagaactgtcaactctgagctggcaacagtggctagctagcttttgcaaggaatagttcctttagtagcctgatatttgtagagagtatcaatgtctaaggaacataagtatttcagaaaattgtaaggtcttgtaagaggctgcagcccaacactggaaggaaagatttaggagttgatgaaattctgccaagggagcaggaatccagtgagtagctagttactgtctgtatccactgcatctgtcttacaacttagtaagtaaggtacctggacatatagccaccacagcattccaaaatacacctgccatagcacctggaaatgtacctactttggcacctgaaaatgcacctgccaccatatgtagaaatgtacatgctacagcacctgcaaatatgtacttggctcaacattgagacatgcacctcccaagacactgagtgactatttgcagagagaaagtttctttcgctggatcatgcaagggcatagaatttaaaccaagtctttttactctatacccaagacattttaagctccagtgcactacacttcaactgcttcaaaagcaaggaagtatttgttaagggaataaaaagacatctaagattttttttttccctttcagtatctgtaactcaacagaaagacttaacaattcatactacctagagatttccatgtatctttttgccttcaaatttatgatgaaagaccaagttgcgcctctctgaaactcgaccaaggtttaagtgtgtccaacctgtcacaaagacatttttaaagtcctcattctgagcatctgattgtcggccataccagcttctcaaattcagcaaaatgtaagctacaattggcatatgtttctaggaatggtggctgctgtgcattttgtgttcagaaaaatacagaggcagaatatttatttagataacttcagaacttttaacatctcccacccccatgctactccccatgctcaaaatgcctgtaggcacatgtcctttcaaggtgaacatcagtaaagtctatccaaaacaataagctataaataaaatttccttaagagaacataaagaatgcaaaccttatattataatttatgttagttagggagaatttgaaatgagaaaataactctttttttttccctaggagaaaatgagaaattctcatgattgatgcaatcaataactgaaataaaaacatctatgtgacatccatggaaaagcctgcagtcactttcaaatcttcaccaagtagtttaggcacataagaccaaacagctgtaataataataataataataataataataataataataataataataaattaacagtgagaaccaggtctgggaaggagggaacaagacattgtggccttgaatcctggcagtaaacttgaccttatacatcagtgacttctgtatgacacagagggaaagtaagtcatgtaatacaaagcttaaatgacatttactcttttctactggggaaggaagagaaatactactttacaaacttttctataacattgttatatatccttggtttaattttattgttggaaattttgctattgagaagacattttagcatgggctgactgcattcagaagaaaagtatctagggaaagtgctacaacacagcacagaccatttcaaggaaaacccttcaacttctttggccagcaagccaaaggcccattatgaggacccacattcaccagctactaccatgggggctaccattactgccatcagggctacaaatgctacaactcagattcctacttacaactaccattatttttcctagaaaaatatgatcttatttgtgtcatcttaatagtaatgtcatctgactcaataaaggttataaaataatcatactcattactcaaacatccataggcagatttcatggaaactgtccctatttccatctgattaaggaagccaaaaaagcaacctgaagagtctaatgttccctactagccagtggtagaactgaagttcagacaccctgacatctgctcctaaatcagtcttactgagacagcatgcacaacaccctgggtacagatattctgggattagaaaccagacgttacaagacatgtccgggggaatctctaaaaggagagatgatacaaaaacaaaaatcaaagctatctgctatagtttgaaagtcccttctaaacttttgttgaaagttaatggccactgtcggagcaatcagttgccaggccctcgactggtccataccactgcctccctatcccttccctaggtaacatttttcccgttcttagaaaagagaaattcaggaactttctaaaactacacccataaggagaaaagagagaaacagttcagtttctacagtgtttgcctcacaagaatgaagagccaagtttggatccctagtgcccacatagagaaaaggaggaggaaggctttagtaattgggaatcttagctcatgccttctataatcctagcactagggggcagagacggctagatctatgtagcacactaaaaagtccatttagctgaattgatgagatccaggactggtaaatgacattgctgaaaggggaaacgggtggctgtagagagttgaagggaagtaggaaaagggaagaagaagggaaacgggaaggaagttgaggaaagcttggaaagacactaacacagaacatccactctaagccaagaacagtctcctttaataaccatgaataaccttagcaccgaaagtacccaagatggtaaatgtggtcagagtagactgagaccaaggatcagggatgggccatgctcttctgtggtgccagaaagattaatgagctgtatacacaggcatttcagagatgactgcacaatatagcgtcactattcccactagcttcccaaacaaaaactagaaaaaatgctctaaaactaacatcagtccgtcccccacccccatcacctagggtcagaaaaatgttgtaatgttaaaaatatcctgactgaaatagaaaaggatttagccaaaatcctaaggctgataggagaccagtcttctccaggattcaagcagaaaagacagtctcaacttctgcttaatatacacaatatccaccaagacaaaggcaaagaaagccctgagaaacacggaaccatggcttcctacaacccgagttatctatttacaaaaggacttaaagctctttctctttcttatattagcagtgtaggaagtgaaagcccttaaagtaaccagctgccatcctcaaacctgaaacaaatttaggtcaggagtgaggttcacttttgaaaccctgtctcaaaagaatatattggcaagtaacagcagacacccagcaccctcctcagacttgtacccacacatactctgtgcatacatcacacacccacaagatgcactacgatctacactcagaaaatcagcttctggaactgaagagatggataaaagcacttgctgtgaacacaagaggatctgagttcaaagccccagtatccaagttaaaaaaaaacaacaaaaaacaaaaaacaaaaagcaaaaaaacttgcttctggatgtatctttctataacctgaaaattagggggatggagacaggctggtcatcctagtgacctcactatcagcctaggtgaaacaggaactttaggttcagtgagaaaccctgtctcaaaagaatatattggcaagtaacagcagacacccagcaccctcctcagacttgtacccacacatactctgtgcatacatcacacacccacaagatgcacaaaaagattagctcttggacaagaatggtgatggccactgtcattttcagtgttcctccaacccccccacccccagacacacggcaagcccttctccctggctacagcctgcaaaagacacctgctaatccacaaactttttgacttcttggaaatatggtcctctgccttaagccaggcaagcccaagccctattttaaagacactcctttcactacttacctgtcacagtcataaaaatggggaaggggttgagaacactggctttcattcaaatgaacctaaaaaataaagaactctaataaagaaggaataggctacaatggttttcttttcctttctctgtatttcattttccagtttttctataaggcctctctgtatgctgcaacatgaagaaaaattaaatttactactgctgaggcaaaatcagggctcctttattataaggctctgaacctgaagaaaatatgtttatgtttgatgagatgcccactccctattgaaaaatccagaagcttttaggacccacatgatgtcgatatattaacttgtgaataattgaaaatgttaataaagaacagtctatccccagtctctagaccacatgaagttggtagcttagttggaagatgggggagggggactcagggaccagccatcccagctgtccagaaggctcagtctgggacatagaggacttcagcctacaaatgtgctcttaggcaaattgctctcaggatggagaggcagtgaaagtaagaggagccagttaaaacacagatcagaattccaactccatgtggacaaattctctacactcggtttcttcatctacaactaccaactacagccctgagtgtccaatatgggaagactctgagagcaagtgagaatattaatcatataaaatgaggccaaaatatatgtgaggctgactgaccaaggacagacaacacaagccctgtctgcctcaagggaacatggggttttagggctagtaacagcttttgttcatcctagtctaagagaattggtcttttacaaggtttgaatcttcacaaattgcataatctgacaaaaatcagttaatcttaaacctcagcttcttcacctaactgcttaagcagcagagccaaattacaaggttgctaaaagctcatcacagaatgacttcagcacttgcgaccgagtacaatgcatggtggaccatcaatacttcatcccataccccatttgctacaattacataaggagatctacttcatctacatgtacagatttaagaaatttgatcactatagtaaccacagctccatatgcatacttacatggagtttttgttttgttttatttctatttttcttatattgaaaacagattttctttcatataatatattttaattaaggtttccctttcccccaactcttcccaggtccttcccaactctcattttctctccttaaaaaacaaggcatcggggctgaagagatgactgagtgattaagaacactgactgctcttccaaatgtcctaagttcagttcccagcaaccacatggtggctcacaaacatctgtaattggatttgatgccctcttctgctgtgtatctgaagacagctacagtgtactcatataaataaaatcaataaatctttttaaaaaagaaaacaagacagttaaaaataataaaaccatgagataaaacaaaatatacacaaaccagaatacgacaaaccaaacagaagaaaatgaaccaaagacacagcacaagaaacatatgtgtagagactcatatatttgcacaaagaaaattccataaaaacacaaaaccaaaaacctatatacaaaaacgacacataaagttttttttaaagaaaaagaaaaaaaaaaaagcccaaagaaagaatcatgagacaacgaacttccaaaactgcaaatgccattaagtttgtaagtgttggcattgactgctgggcatgaggactgcccttaagactagtttgtatagccaatgagacaccatagaagaaaactaatttttcatttacaagtagttatcaactgaagatagcttgtgaattagggatgtcggctgtgtcttctcctctcagcactggaactccttctggcttagactcatgcaggccttgcacacactgacacagtttttggaagttcatatgagcatcagtacctgatgtatttagaagatcttgtgtccttggtattctctatgccctctagttcttacagtctttctgcctccccttccaaagggttctgtgagcccaatggagtagagggagaatttgatagagacaccccatttataattgagtgttccaaggtctctcactgtctgcacattgtctggctatgagcctctgtgtttatgctcatctattgcaggaagaagcatctctgatgatggctgagcaagacgttatttaaagatgttccttgagtatcttagtctcggtttctattcctggacaaaacatcatgaccaagaagcaagttggggaggaaagggtttattcggcttacacttccatgctgctgttcatccccaaggaagtcaggactggaactcaagcaggtcaggaagcaggagctggtgcagaggccatggggggatgttccttactggcttgctttccctggcttgctcagcctgctctcttatagaaccaagactaccagcccagagatggcaccacccacaaggggacctccccccttgatcattaattgagaaaatgccttgcagctggatctcgtggaggcatttccccaactgaagctcctttctctgtgataacttcagcctgtgtcaagttgacacaaaactagccagtacacttgagcatatcattagtatttggtttgctcctaggtccctggcctatctagtctcaggttcttgtctaccagagcagtgttaaaaatggattccataccaggggtgggccttaaattcagtcagatactggttggttactcccataagtttgtgcaactactgcactagtgcatcttgcaggcaggtcaccactgtagctcaaagggtttgtagctggactgatactttcctttctgctttggtactgcacagagtaccttccaataccaggaaaattggtcaacaggcatgaaggctctatttaggtatcatcacaacttcttttttttttatatacttttattaggtattttcctcatttatatttccaatgctatcccaaatgtaccccataacctcccacccactcccctacccacccactcccattttttggccctggcgttctcctgtaatggggcatataaagtttacaagtccaatgggcctctctttccagtgatggccgactaggccatcttttgatacatatgcagctagagtcaagagctccggggtactggttagttcataatgttgttccacctatagggttgcagatccctttagctccttgggtactttctctagctcctccattgggaaccctgtgatccatccaatagctgactgtgagcatccacttttgtgtttgctaggccccggcagagtctcacaagagacagctatatctgggtcctttcgataaaatcttgctagtgtatgcaatggtgtcagcgtttggaagctgattatgggatggaatcctggatatggcaggctctagatggttcatcctttcgtcacagctccaaactttgtccaaactccttccatgggtgttttgttcccaattctaagaaggggcaaagtgtccacactttggtcttcattcttcttgagtttcatgcgtttagcaaattgtatcttatatcttgggtatcctaagtttctgggctaatatccacttatcagtgagtacatattgtgtgagttcctttgtgattgggttacctcactcaggatgatgccctccaggtccatccatttgcctaggaatttcataaattcattctttttaatagctgagtagtactccattgtgtaaatgtaccacattttctgtatccatttctcttttaaggggcatctgggttctttccagcttctggctattataaataaggctgctaagaacatagtggagcatgtgtccttcttaccgattgggacatcttctggatatatacccaggagaggtattgctggatcctctggtagtactatgtccaattttctaaagaaccgacagactgatttccagagtggttgtacaagcatgcaatccctccaacaatggaggagtgttcctctttctccacatcctcgccagcatctgctgtcacctgaatttttgatcttagccattctgactggtgtgaggtggaatctcagggttgttttgatttgcatttccctgatgattaaggatgttgaacattttttcaggtgcttctctgtcattcagtattcctcaggtgagaattctttgttcagctctgagccccattttttaatggggttattagattttctggagtccaccttcttgagttctttataaatattggatattagtcccctatctgatttaggataggtaaagatcctttcccaatctgttggtggcctttttgtcttattgacagtgtcttttgccttgcagaagctttgcaattttattaggtcccatttgtagattcttgatcttccagcacaagccattgctgttctattcaggaatttttcccctctacccatatcttcgaggcttttccctactttctcctctataagtttcagtgtctctggttttatgtggagttccttaatccacttagatttgaccttagtacaaggagataggaatggatcgattcgcattcttctacatgataactgccagttgtgccagcacgatttgttgaagatgctgtcttttttccactggatggtttttgctcccttgtcaaagatcaagtgaccatagatgtgtgggttcatttctgggtcttcaattctattccactggtctacttctctgtcactataccactatcatgcagtttttatcacaattgctctgtagtacagctttaggtcaggcatggtgattccaccagaggttcttttatccttgagaagagttgctatcctaggttttttgttattccagatgaatttgcagattgtcctttctaattcgttgaagaattgagttggaattttgatggggattgcattgtatctgtagattgcttttggcaagatagccatttttactatattgatcctgccaatccatgaccatgggagatctttccatcttctgagatcttctttaatttctttcttcagagacttgaagttcttatcatagagatctttcacttccttagttagagtcacatcaatgtagtttatactgtttgtgactattgagaagggtgttgtttccctaatttcttcctcagcctgtttatcctttgtcattacaacttcttgttcattgacttgtgtaggtatgtctttaacagtagggccttactatcggtttgcagaggcaaccaaatagccttgactgtttgaaggccctaggaggccccaatggccaacaaatcaagtagatgtaatttattcccagaactgaaaacttcatttgggaacaagagatctctccatctccttgtcatttggcattccattcagatatccttatgcatattttatgaaaattctactgtattggatttccatacccctcaaaaggcccttaattttagctgtgtctccctgtacttcctctgactcccctcttaattccatctcctagtttaaagactaggagagatggaagggtctccctaggaaggaaaaaatagaatatatagtcatgactagacttgcatggggagctggaataggagtatatgaagattttgaaaaacagtttcaagaaaacaaaacatctcaccttacagggagcattctgcaaggcggattaactgaggaaaacttcaatgattgtggagagtttggaacaagcctagttataattatcctggcaatccttagtccctttgaaagacattccttacccacctctgcacctttactctaacacccttgggattaacagggagaagtttttgatgtattaacaaaccaccagcttcctcctggcatatggtaggaatgccaccacagagcatctggggcctataatggggatttccctatgttgctgtaatctgaccacctaatgttttcaccaatgcattaaaagtgccttgatttattacttcgctctttatattaataaaactttcataaaactattgacatgatggaaatgagatttggagttacctgaagctgtgttcctgggccagtcactaacatctgactccagattaaactcaatcttattaattctctgagtaagaattgtgcttttatgtaaaagagttttataaacagagagagagagagagagagagagagagagagaatggcagatgtagggttaaaaatgtagagtctggaataagagactgtttgcgttcaaactctccattggagtaagagactgtgttcaaactctctctccattctttcttagctatgtgattgtatgacacagttgctatccctaggccttgatttcttgttgtataaaataagacaataactgtatgtagcacacaagggttctatgactttagtaacttaatacatatttatgagaatatattctactccaatactacaaagatattcatttgtacagatatatacaagagtgagctacttaccatttgatgagaggtggcttcaatgatgactagaataccaaagtgcaaggatccataaggtcagagagaagttaagacagaagcctggggtgacagtgggaatacaacttcctcctagcctcaacccatccctaccagaggatgccaatcacacagactaaagaaactgatggctataggatcaatccaagccccagatctataagggaaagaagaaacattaaaaaaaatttttgaaggaataaaataagaactcgtataagaaaaacaaaataaacctataagatataaacaaaggcagttgagggcattgtttttgtttttgtttttgagtgagatcataacagcaaaacaatataatcaaagaaaccagagaaagaaaccaggaaagtcccccttgtagaagagcttggaaaatgccaaggaaacagagacaggtgagaaaagagtcaaaagagtctcccaaataagaagggacagcagaaagaggagaaaagggggccttgcagccatgtcatccatcacccgagagcctgcacagtcaggaagccacagatctctctttccctgtctttgggtaacaccacagaagataaaactactgctggatctcttacaaatgagcactgcctccaacttcctcttccaaaaagaccacattacccattagtcagggtttcagaaactgcatgaccctgtggttgcagtaaacttatactatcagtgtcatcaaagtctccagcctctgccactgattcagggggatgtgtctgtgctgctccaattaagaacagagctgaagatggatagcagatgacaagcacactggagaggacaaagcccagaaaactgcaggataaaaaagagagcctcattcagccccagctgaggtcagctccaccgctggagacgccaattaaaatgagcttccagcatactccataagtggcattcaccaatctgctcctgaccaacatgtaagatatactctgacaccaggactctgggtccaggatcctccgttcccataaggttgttataaaactcataaaggagaaaaacaagataaaactgatgagtgttattctattttccccatttacaaatgtgattctagaaaatcatgaacagcctgctctgaactcaaattagtatgtctgtctacaaaatagggaccctaagtacaatcttaatcctccatgtgttgcattacttactacataagacgaaaattttttaaatgatcaaaaatttgataatgtctgaaattgacttcaaagttacatacaagaggcacagtgcactcatgtcaaaatgaacttacaataaaaagtcaggtctagagagatggcttagtaattaagagcactgactgctcttccacaggaccttggtttgattcccagcatccacgggacagttcacaaccacctgcaactctagaaaaagtcttcttctgacctctgagggcattaggcatgcatgcagtacagagacatacacccagtcaaatacacataaacttctacacataaaataataattaatggaggggtgggagtggaaaggaaaactagtttacaagggagaactgatggaagaagtgcccccctaaattttcaacaggtatcagtcaacgaatgataatcaaaagataccaatctccctcctttcctgcattcctctgacatgtggctctgtatccccaacctcatgcagatatgcctcatactaactgctgctacatcacaggatgtgggagcttcacacatttttctaaggtctaacctgaaggaaatggcataatcattcatatccctgcacactgaacagctttacacagtttcaatgggtccatgatattgctacaaatgcagaccctaggatattcacaagtccttcatggaggcaaccatgggaacacaacaaactgaggtgagacccatagtcaccacagtaaagtcgaaagcactctgtgacaacaggaatcatacatcccacctaacaccatgtgactcaattaaaaacagcaacctccatgacccttgggatgaagaacagtgaattccaaatggtttgcataggtggactggaaacctctttaatcaattatcattcctccagattgatgaggtcttctttttttctagaacactactgaaagcctgcctgggcggagaaacagtgatatgcccagccccttgcagaatgtccccagaaacgagtgatacagcagagaagcccctgtaatctcacagagtggggcacgtctgcccacaagatgtcatgcactaagcacccatgggagagcctcccatcacctgagtcttctcattccagaaacacttttggagccacataacccaggcactactggaaggaaacaaaggtatataatccatgcagtgagaaccaataacaggagatcaactaactagcaaacaggggtgattctgcttgtaaattacatatgaagagctaccaatgtaagtcagcaaaataaagaaacagaagagaaagtactggtgacacagagacagaattctctacagatttatttatggaaaaggaaagtagtgtcctttccctcattaaagctgcacaagctgggatttgacgtatacactatactagcttttgctgagttttgaattcatcaggtatatgcagtcagctagacttagcctgcaactaagaaagaagaaaatatgtaaaaatcatgctttgtgttgtttcagatggctcggaaccatgcctggctcactcactctatttcgcaatagagtgggcaggataaccttgtcaccctttgacaggcaaggatcctatccaatgctttctatgttacataattatctaggtatagttttcaactatatgtttatctctgacataatggtagattcacaaggaggtccaaaaatagcagagtggtcacaagtacccttcatcttacattatgagatgatactaatgttcaaaacagaggattagcatcagcaacacaatgactcggatttgatatattactcatattcttacttagcatgtgcaaaggccctgggtttgatcctcagtatgaaccaaatcaacaggaaaagaaatgacctcattctactgtgttacatatatacccagctctgcccactgccctacccctaccccaccaatacgttcttacactctacaaccctgtcctatgagataatatgtattagaatgagattatttctcttagcaggctgtcctaagagcccatccctgaatttctcaaacattgttgcctccctgagtagatccactcggatacacttcctcatttacctgaggaaggatatatgagttacttacaattttttgttcttacaagcagaaatccaataaagaaatatagacataaattttattctcccaagataaatgttcagtactggaattgccatatcatatgataagtaaacttaaggactcatcatacagatgttcaatatggcaaataagttttctcatctaccccaaacatgtaacttctgtgcaacctcaacataaggcactcccagtactttcatctgtaagcattctattgaggatgtagaaaagctctttacaaattacgtgtatttctcaaggtccatgactacgtttaaaaatgcttgtttgtaatgcacatattttctctcttgacttgccttttacccattttccaactgtagtatttggtttcttattgttgaatttgtagtgatttttgcatatcctaaaaaggaatctcctataaggcatcagacttatccctctagttagtttaacatactttttcatcaccgtaacggaatcaaagcagtgtaacaaactatgattaagtgcagtctgttcatttcattttatcaactgaactcttattactctcaaaagagaaagtattagtaaaggtacttggggaaataatctcacacatacctcatgtctcaatgctgtgttctaaagggggaagtaacaagaatatgtatctgatactataagaggtaaagagttaatccaagtacagcaaggtacagtgaagaataaaagttactgaactcttcctcaccccagaactcgttcccagaacactcctgaactcttcaccctagaatgcattcctgaactcctcaccctagagttcgaaccctcccaactaaagactgttccaagaacatttttgagataagggcctcctggaacaacctcagaatgaaccgggtacattgccaaataataggacatgaccccttagttacgtagaatcccttggcagaaccccttgtcccttggcagaaccccttagttatgtaaacttgtactttccctaccccgctctccccccttgagttttcctatataagcctgtgaaaaatttggctggtcgtcgattctcctctacaccactaggtgtatgagtttcgaccccagagctctggtctatgtgctttcatgctgctgctttattaaatcttgccttcaacattttgagttcggtctcagtgtcttcttgggtccgcggctgtcccgaggcttgagtgagggtctcccttcgggggtctttcatttgggggctcgtccgggatcagtgcgaccacccagagaccctagacccactttaaggtaagattctttgacctgtcttggtttggtgtctctgttctgtttctaagtttggtgcgatcgcagtttcggttttgcggacgctcagtgagactgcgctccgagagggaacgcggggtggataaggatagacgtgtccaggtgtccgccgtccgttcgccctgggagacgtcccaggaggaacaggggaggaccagggacgcctggtggacccctttggaggccaagagaccatctggggttgcgagatcgtgggttcgagtcccacctcgtgccttgttgcgagatcgtgggttcgagtcccacctcgtgcagagggtctcaatcggccggccttagaaaagccatctgattctctgagttgcttgtggtcgacgcgaagtcgccgccgcttttggtttcttttttgtcttagtctcgtgttcgctcttgttgtgtctactattgttctggaaatgggacaatctgtgtccactcccctttctctaactctggagcattggaaggaggtgcgggtcagagctcacaaccagtcggtggaggtcagaaagggtccgtggcagaccttttgcacctccgagtggccgacgtttggagtgggctggccaccagaaggtgcttttgacttatcactaatcgccgccgtcaggcgaattgtttttcaggaggaagggggtcaccctgatcagatcccctacattgtgacctggcagaatctcgtccaattcccacctccgtgggtcaagccttggaccccaaattcttcgaaactgacggtcgcggttgcccagtctgatgcagccggaaagtccagcccgtcagctccccccaagatttatccagagattgacgacctcctctggatggactcccaacctcccccttatcccctgccccagcagccacctgcagccgccccaccacagggaccaatagcgagaggggctcagggaccggcgggggggactcggagccgacgaggccgaagccccggggaggaaggggggccggattcaacagttgccttaccacttagagcacatgtgggagggccagcgccaggacccaatgatctcattcctttacagtactggtctttttcctcttctgatttatataattggaaaactaaccaccctcctttctcagagaacccctctgggcttactgggctccttgagtcacttatgttctcccatcaacccacttgggatgattgtcagcagcttttgcaggttctttttaccacagaggaaagagaaagaatcctgatggaggcgagaaaaaatgttctgggagaggacggcacacccactgccctccctaacctcgtggacgaggctttccccttgaaccgccccaactgggactacaacaccgcagaaggtaggggacgcctccttgtctatcgccagactctagtggcaggtctcagaggagccgctagacggcccaccaatttggctaaggtaagagaggtcttgcaggggcagactgaaccaccctcagtcttccttgagcgtctaatggaggcatataggaggtacaccccttttgaccccttgtcagaggggcagagagccgctgtagccatggccttcattggtcagtccgttcccgacattaagaaaaagctgcaaaggctggaggggctccaagatcatacgctccaagatttagtaaaagaagcagagaaagtctatcataagagggaaacagaagaagagaggcaggagagagagaagaaagaaatggaggagagggaaaatagacggggatttcaggagagaaatttgagtaaaattttggccgcagttgtaaatgatagacagtcaggaaaaggtaaaatagggctcctgggcaacagggcagtgaaaccgccaggtggcagaaagataccactggaaaaagaccaatgcacctattgcaaagagaaaggacactgggctagagattgccctaaaaaacgggagcgatccaaggtcctgaccctagaagatgattagggaagtcggggctcagaccccctccctgagcctagggtaactttgtccgtggaggggactcccgtcaacttcctgatagacaccggagcagagcattcagtactcactagccccctaggcaagctaggctctaaaaagaccatggtgattggagccactggtagtaaattttacccctggacgaccgaacgagccctacagataaacaagaacatagtgactcattccttcctggtgatacctgagtgtcctgctcccctcttggggcgcgatctgctaaccaaactaaaggctcaagtccaatttacttcagaaggcccacaagtaagctggggaaaagcccccgttgcctgccttgtcctcaacacagaggaagaatatcggttgcatgaagagcaacccaaaaatgcagtctcttcaggctggctaactgcgttccccaatgtctgggcagaacaagcaggaatggggttggctaaacaagtgcctccggttgtggtagaacttaaagctgatgccacccccatctcggtaagacaataccccatgagcaaggaagctagggagggcatccggcctcatatccagaggttgctagaccaaggagttttagtggcctgtcagtccccctggaatacaccacttctgccggttcgaaaaccagggaccaatgactatcgcccagtgcaagacctccgggaagttaacaaaagggtcctggacattcaccccacagtcccgaacccatacaatttattaagctctctcccacctgagagaacatggtatacagtcttggacttaaaagatgccttcttttgcctgcgcttgcaccctaagagtcagctcctgtttgcctttgaatggagggacccagagggcggacagactggtcaactaacctggactaggctaccacaggggttcaaaaattcccccaccctgtttgacgaggccctccatcgggatctcgcgccttttcgtgctcgaaaccctcagcttaccctactacagtatgtggatgatctcttggtcgcggcggcctcgaaggagctgtgtcaccagggaactgagaggctccttgcagaactgagtgacttggggtatcgagtttcggctaagaaggcacaaatttgtcaaactgaggtaacctacctggggtataccctccgagggggcaaaagatggctcacagaggcccggaagaagactgttatgatgatcccatcgccaactaccccacggcaggtacgtgagtttctggggactgctggcttttgtagactctggattccaggctttgcaaccctagcagcacctctatatcctttgactaaggaagggtttccttttgagtggaaagaagagcaccaaagagcttttgaggctatcaagtcgtctctaatgactgcccccgcgctagcattaccagacttgactaagcctttcgtcctatatgtggacgagagagcgggtgtagccaggggagtgttgacacaagcactgggaccctggaagagacctgtagcctatttgtcaaagaaattagatcccgttgctagtggatggcccacatgcctgaaagctattgcggcaatggccctgctgatcaaagatgctgacaaattgacaatgggacaacaggtgactgttgtggcccctcatgccttggaaagtatcgtgcggcagccacctgacagatggatgacaaatgcccgaatgacacactatcagagcttgctgctaaatgagcgtgtaacctttgcgccccctgccatcctcaacccagctacccttctccctctaacaaatgattccgtcccagtacatcaatgtacagacatcctcgctgaagagactgggaccagaagagacctgactgaccaaccctggcctggagctcccagttggtatacggatggcagcagtttcctgatagaggggaagcgaaaggctggagctgcggtggtggacgggaaaaaggtaatttgggcaagcgctttgcctgaaggaacgtcggcacaaaaggctgaacttatagcacttatacaagccctccgagaggctaaaggtaagatcgttaacatctacactgacagccgctatgcttttgctaccgcacacatccatggggccatctacaggcagcgagggctattgacttcggctggtaaagacattaaaaacaaagaagaaattctggccctgttggaagccatacatgcacctaagaaggtagccatcatccactgccccggccaccaaagaggagaagacttggtggccaagggcaaccgaatggcagactcagtggcaaaacaagttgctcaaggggccatgatcttaactgaaaaaggtgatccacccaaaagccctgaggatgagaggtataacataaaagagctattgtggaccagtgatcccctcccatacttttttgaagggaaaatagaattgactcccgaagaaggaataaaatttgtgaaaggactacaccaattcacccacctgggagttgaaaaaatgatgagactaattaagaattcccgataccaagtccccaacctgaagtcagtggctcaaaagattatagactcctgcaaaccatgtgcattcactaatgcgactaaagcctacaaagaacctggaaagagacaacggggagaccgtcctggagtgtattgggaggtagattttactgaagttaaacctggaatgtatggtaacaagtatctgttagtatttgtagacactttttcaggatgggttgaggcgtttcccactaaaactgagactgcccagattgtggccaagaagatccttgaagaaatcctgccaagatttggaatccctaaggtaatcgggtccgataatggaccagcctttgttgcccaggtaagtcagggcttggccactcagttgggcatcgattggaaattacactgtgcttaccgccctcaaagctcaggacaggtagagaggatgaataggaccttaaaagagaccttgactaaattagccattgagaccggcgggaaagactgggtggctctccttcctcttgcgctcttccgagcccgaaacacccctggacgtttcgggctcactccttttgaagttctgtatggaggacctccccctttaatggaagctggtggaacattggtttccggctctgaccctgtcttaccctcctctttgcttattcatttaaaggccctagaagtgattaggacccagatttgggaccaactgaaggcagcctataccccagggaccaccgcagtaccccacgggttccgagttggagataaagtcttggtcagacggcatcgaaccggcagcctcgagccacagtggaagggaccctatttggtgttactgacaacccctactgcggtaaaagtcgacgggattgcctcctggatccacgcctcccacgtcaagagggccgcaagtcaagatgaagaaaaccatgaagacaattggacagtggcagccactgacaatcctcttaagcttcgtttgtgccgcaggcgccaccctgagcctagggaaccataaccctcatgctccaattcaacagtcttgggaagtgcttaatgaggagggaaacattgtgtgggcaaccactgcagtccatcccctctggacttggtggcctgatctcacacctgacatctgtaagttagtggcaggatccaccaaatgggacctccctgatcataccgatcttagtaacccaccccctgaagagcggtgtgtcccaaacgggatagggagcacatattggtgttcggggcagttttaccgagctaatcttagagctgcacaattttatgtttgccctggtcagggtcagagcaaaaggcttcaacgagaatgtggaggggcatcagattacttttgtggtaaatggacatgtgaaacgacaggggaagcttactggaagccctcctctgactgggacctaatcacggtaaaacgaggaagtggctatgataggtcaaacgaaggagaaagaaacccctataaatatccagagaatgggtgcgcttttaaaaacagccccccaggaccatgcaaaggtaaatactgcaaccccctacttataaagttcaccgagaaagggaaacaacaccgtctaagttggcttaaaggaaataggtggggttggcgagtataccttccactaagagatcctgggttcattttcacgatcaggctgacagtgagagacctggcggtgacacctgttgggcccaacaaggtccttatagaacagggccccccagtcgtaccggctcccccaaaggtcccagccgtaccagctccaccaactccacagcccaacatagtggtaccctccctagggactaatactcccctcataaagcctaccttggcttccccaccgcccctaggtacagaggaccgtctggtcagtctactccagggagcttttttagctttaaatagaactaaccctaatatgactcaatcatgctggttatgctatacctctagccccccttattatgaaggaatagctcagatcaggacttataatattacttcagatcattctcaatgtctttggggagaaaacagaaagttgactctggcagcagtttcaggaagagggctttgtttgggccaggtacctcaggataaagggcacctctgtaatcagacccagaacatccagtctagcaaaagtggtcagtatctagtgccccccttagacacagtatgggcttgcaataccggtctcactccttgtgtgtctatgtctgtttttaatagttccaaagatttctgcattttggttcagcttattcctagactcctgtatcatgatgatagctcctttttagacaaatttgagcgttgggtccgctggagaagagagcccgttaccctaactttggcagttctattaggattaggagtagcggctggagtaggtacaggaaccgctgccttaattaagaccccccaatactatgaagaactacgtgcagctatggatgttgatcttagaactatagaacagtctataaccaaattagaagaatctttaacttccctgtccgaagtggtgctacagaaaggaaggggattagacttattattccttaaagaaggaggactctgtgctgccctaaaagaagaatgttgtttttatgttgaccattcaggagtaatcaaagattctatggccaaacttagagaacgcctagatatacgtaaaagagaaagagaaagccaacaaggatggttcgaaagctggtttaataagtccccttggctcaccactctcctctccaccatagcaggacctttgattactcttatgcttttgcttacttttggcccctgcatccttaataagttagtagcttttattagagaaaggataaatgcagtacaggttatggtactaaggcaacaatatcgggtccttcaggaggttgaaaactcgctctaagattagagctatttcctaaaaagagtggggaatgaagaataaaagttactgaactcttcctcaccccagaactcgaccccttccatctagagagtgttcccagaacactcctgaactcttcaccctagaatgcattcctgaactcctcaccctagagttcgaaccctcccaactaaagactgttccaagaacatttttgagataagggcctcctggaacaacctcagaataaaccgggtacattgccaaataataggacatgaccccttagttacgtagaatcccttggcagaaccccttgtcccttggcagaaccccttagttatgtaaacttgtactttccctaccccgctctcccgccttgagttttcctatataagcctgtgaaaaatttggctggtcgtcgattctcctctacaccactaggtgtatgagtttcgaccccagagctctggtctatgtgctttcatgctgctgctttattaaatcttgccttcaacattttgagttcggtctcagtgtcttcttgggtccgcggctgtcccgaggcttgagtgagggtctcccttcgggggtctttcaacagcattcgaagcaatacctgatatccatggttccccactgttatcactactcacttgtgaaagtaaagccttttgttgctcagactacccagaggaatcctaggaggaaacccctaatatttaattaactttggaaataatgaatgacttggtgtgtgattaatagattaatagattcttcaggcaaaggagtcaggtcaacattctcaaagatatcagtaacaaaaaaccatttgaccttacattaaagccaaatctgaagagggtaatctggttcctatacctcccaatcataaacacgtatacccacagcaaagtcagtggcactggactgctagctatgccctagggaagactctgctcccattatcctttggggaagatgtcttctccttagaacctgcaggtgaattagggcaattgccacttgccttgggtatggttccaaccccaactgtatactacggtgtaacagagacatcttgaagctcaattaaaggaatattttaaagtaagctttgggaaaccactgcagcagaggtttccttccccctcctttacttaaaagcaatgaagggagaaacaaattggatctctttccctaatccccttgtggagataatctctttagacatatggtagagttaactagtcattcatttgtttgtgtatatatacagtgtcatacctataaccttctatctgagaggaaatgctcatgactatctattcctctgtagatcataacagggacgcctagcaaccaactgaccctagcacctatacagtatttcctaaatataatcaaggttcattaatgtaactaattacatagcaatgttgggtgaatggacaggtaaacggttaaacaggcagacaaatggaagaaaagtaaaggtagatgggtatacagatagacaagtgaaaggataaaaagatggaaggctaagtggttagttagatgaccagactaagagaaagaagggtaggtgaaaggatagactggtggatggatgattagatggacaggagaatgaaatcaggagacaaatagacaactagaaagatgtgaaaatgagtggatcaataggaatatagataactacacagaaaggaagaagagcaaatatgtgggtagacagaagaacaagaaatggatgaatatgaaaaggataggatgtgaattagggatgataagggataaggaaggaaggaaggaaggaaggaaggaaggaaggaaggaagggagggagggagggagggagggagggagaaaggaaagaaggagagaaaaaagaaaaagaaagagaagagagagggaaggagggagggagagagagagggaggggagagggagggggaggggcagagggagggagaggagagagatggatgaacagacctatggaaaaatagggatattaagatgagtcagtcagtgggtagaaaaatttacaacttgataactgggaagatggatgaaagtttgggtagataaaagtaattggataaatgggaaaatagtaaatagcagctgggtagatcagatgggtgggtgagaaggtagcatgaggaaatgggtgggaagacagctaaatgaatgggagcttgggtgggaatgtgtagacaggtagacagctggaggaatggcaagtcaggtggttcagtgggtaaacagacagctatatggataggaagacaggaagaggaatatatagcctgatgaaaactaagaatgaagatgtcaggaaagagaaatgtctactgataccttaaagtcacttctggaaatccaagtaggcagtataagttcagcttgctcaacaataccactttgtcagaaaagtatagaacttcattcttctgaacattctcaggagtctgctgccttagcctcacaccctctcttcctaattagaatgcttattagtctagatgtcaatcatctatagagcttccatagcatcttataattgggagtgtcttccagttaattctggaaggatttggtggtgtaacatgaaaaatacatgcaacttctcctagagtttgagcagctttaccagtggaaagtacattgttgaaacccagtaaatgttaatggaatccataggtctgtaaggtgctatgactgattgtttaacaaagtaaacggccaaaagcagaggaactatgactgaagagtgcaagaccaccctcaggcttggtaattcactaataaaactcagagacttagcacatagctagtcatggctgtgactaattatggcaaaatgacaacaagcagcatctgcaaagggaaacaatatgtaaggtgagattaagaggaaatgaggttcagctaagggtcctctccagtagtgtcacacaagatgcatttaattcctccagcagtcaacaatgacatgtatgaaaacctgggtggatagagagagcactggagaggtaggcctcctttatctgacatatggcaagtctgcagactcccaaaagcaaacagcaatggtgcagtgagccagttctatcaggtctgagaaagttcatatttccagaagatggcctcaatcatgttcaaacatctttctgaagacagaagtcaggacactatgctatcttggttcaaacgatgagccagtgataaaataatgaatcacatttttccacattagtcttcaggctcagaggggagcctgattactctgtcatttcacaaatgtattattttctcctctgcttgtcttccacaccacttgcaatggctcttccaagtcattcaaagtaaaaactccacccagaattatctctctgttaggctcttagcagcaggtctatgggaaggatttgcaacctctcctgtaggattaattgaaacccagtggctacacccttttttgggtactttctgaataccagatgatatgttggtctcttgcttgtgtcagtcagtcttctattactgtgataaaatactggatataatgtaaaaagacagaaactttgtcttggcatacagcttcttatctcatggaagaaggatagaaaataaaaaaagtgaccaaagtcccacctatgtccttcaagaccaaattcccattaacctaacttattcccatgaggctccatttccttaagtctccaacatctctcaaaaattgagcaaaatgtcatttgccacatggacttctgatggacacttatctaaaccacacaacttgggatacaaataagaaaagcataactccctgacctcacagcccagctcactgctgctttgcacagcagaaacttctctccccctcaacgcctccccccacccccccatgcatgaagtacttcatatgtttgtgtgtagcaaagtactttatttttaccagatgcaagactgcagatctatgtttacaattttcaaatcttagtttgaaggaccgacttagactcacgcatgagaacttgagtttgcattccacacaccatggaaagacagacacagcgcatgcatctgtaatccttgcgctggttgggggactgagataaggaaattgcaaggcctttctgcccatcaagtctaactgaaacagcaagctctgcttcagtgaaagaataccatctcaaaaacatagagaaacacacacacacacacacctaccttttaaaagggattaaattaagccccattgtcccacccatcacttggcctttttttgcaatcaaattcagcatgctcccttctacggatatacttccttcagctaatttcatcaggctcataatctttgatgtcatttgaatgttggcaaccccacaagtctgtattactcaccgtcaccttgctccagagctgctggcttatgtccagtttcccagcataatacaaccatttggatatgtctaaaagccaccactaactcaataagactgaaatcaaactcctaatgccagtttgcaagccatttactctgggagaagaacattagcaattctcctcattagagtaaatgggattctattgccccccccaaccctgcccccacatctacttctagcatctcaaataagaaaccagattcctttttgacacctccctttgttagtctccacattgcagtacctacaaaccagatgattttacctgaaaacatgctagtgttctgatgacttcccacttttttcttgccagtgtccttgtggttcaaagcaccagcatctcctacccctgattcctgtatgtgagtacactgtcactgtcttcagacacaccagaaaaaggcataggatccccattacagatggttatgagccaccatgtggttcctgggaattgaactcaggacctttgcaagagcagtcagtgctcttaaaccctgagccatctctccagctctccatccttggttcctaataccacatattccatgatcccttctcaaattaatagtcaaaaagattgttttgaaaagcaggcaacattcctcccctctgcttgtcttccacaccacttgcaatggctcttccaagtcattcaaagtaaaaaccccacccagaattatctctctgctaggctcttagcagctgggctatgggaaggatttgcaacatctcctgtaggatgaattgaaacccagtggctataccattttctgaagctcagcaatcaaatggtcatgcctttctggaggtttctttctggaatttggacaaaagcaccttgggtctggtagcaaaaatgcttcttctctcctcacacacgcccaaactgagtggacataccctcctcacacagttacttactttgggtctcaaatgaggatcttgcaggtcctcatctaaatcaccttgcttggtgaggcaggagaatgatattcaagatctacctggataggaaacaggttcaagatttgcatggacaatttagtaagactttgtgaaatgaaaagcaaaagaatggtttggagatatagtttagtggtagagagcttgcttggcatataaaagggcctggattcaattcctagtactagaaggaaaaacaaaaaattcagaattgtgcatagcatgagtcaatctttgcactttaaaattttcttactgtcaatgttaactttagctcctgtttatctccattcactggaatattttgctattttaaaaataaatattacaggcacatgcctttaactctagcacttagcaggcagaggcaggcagaggcaggcagaggcaggcagaggcaggcagatctctgtgagttcaaggctagctggcatacacagatagttccaggacaaccaagactacatagctcaaaacaaaacaaagctactaaaaactaataaattgaaagtcagaggaaataaagactttaaaagagaacagagacatgtagtgtactcacaatgctatggaactacatctattcaagctcaaaaattctactttaccaaattaagacctccagatgctagccatttattttcacactcaccccagcttccaatatgaaaatcagcttctgtagattatcacctattctaagtgcatcttacaaacgggatcagacaatttgcagccttttgtatctgtcttctttcacagttccttccaagaattaagattatgacaacattcattcatcacaattccaatgtctaagaataattcatgaccaaagtaaacagagtgcatgtgagtgaatgagtgaatgagtgagtgactgagtgcgcgagtgagtgagtgatgaacagatgggtgggttatgggactgtttagatggtttacctgatcctgttttaactttggcagcttgtatgtgtctagaaaattgtccatttcatccagactttcctatttagttaagaataaacttttgtagtaggctctgatgatttcttgaatttccatagtgcctggttgttatgtctcccttttcacaggtcaggtagggttcctgtgtccctgctcctgctggtcccaattattcccagtggtgttgaacacatgttgcgttctactcactggtgattctaagatcctgggcatgctcaatgcactgtattcttttttattactattattagatattttctttatttacatttcaaatgctatctcgaaagttccctgtaccctcccctgtgccctgctcccctaccgacccacccccactttttggccctggcattcccttgtactggggcatataaagtttgcaagaccaagaatgcactgtattcttaaaaagatatcaagagaatgaatagtatgaggatgatgtaaaataatatacttgttaagtagctacactgaagaagcctttaatacacaaacatgtcaaaacatgtttattatacatgacaaaaacatgatttatctgtcaattgaaaaaataaattagtgccattccggtctgagctgcaccggggtagctagggtacagagtcggctgatacccaccagctacccacaacacccaccacgcgatcttaagacttctggtgagtggaacacaacatctgctccaatccaatcacgcgggacctgagactgcattagttagggaagcagaaaacccggactgagtaggggcacaagcccctttcggtccgagcagcaccagggtagctagggctcagagtcggctgacacccgccagctacccacagcacccaccacgggatcttaagacttctgaggatagggatctgcccagtgtgggagcactttgcctgagcatcggcagcagacatcttggttccgggaccctgccaaatgtatcctgcacagacatcttggttccaggaccccgccaagtgtatcctgcacagctccagagaataccagatggcgaaaggcaaacataagaatcctactaacagaaatcaagaccactcactatcatcagaatgcagcactcccaccccacctagtcctgggcactccaacacaaccgaaaatctagacccagatttaaaaacatttctcatgataatgatagaggacatcaagaaggactttcataagtcacttaaagaattacaggagagcactgctaaagagttacaggcccttaaagaaaagcaggaaaacacagccaaacaggtagaaatcgttaaagaaaaacaggaaaacacatccaaacaggtgatggaaatgaacaaaaccatactagaactaaaaggggaagcagacacaataaagaaaacccaaagcgaggcaacgctggagatagaaaccctaggaaagagatctggaaccatagatgcgagcatcagcaacagaatacaagaaatggaagagagaatctcaggtgcagaagattccatagagaacatcgacacaacagtcaaagaaaatacaaaatgcaaaaggatcctaactccaggtaatccaggacacaatgagaagaccaaacctacggataataggaattgatgagaatgaagattttcaacttaaagggccagctaatatcttcaacaaaataatagaagaaaacttcccaaacataaaaaaagagatgcctatgatcatacaagaagcctacagaactccaaatagactggaccagaaaagaaattcctcccgacacataataatcagaacaacaaatgcactaaataaagatagaatattaaaagcagtaagggagaaaggtcaagtaacatataaaggaaggcctatcagaattacaccagacttttcaccagagactatgaaagccagaagagcctggacagatgttatacagacactaagagaacacaaatgccagcccaggctactatacccggccaaactctcaattaccatagatggagaaaccaaagtattccacgacaaaaccaaattcacacaatatctttccacgaatccagcccttcaaaggataataacagaaaagaagcaatacaaggacagaaatcacgccctagaacaagtaagaaagtaatccctcaacaaaccaaaaagaagacagccacaagaacagaatgccaactctaacaacaaaaataaaaggaagcaacaattacttttccttaatatctcttaatatcaatggactcaattccccaataaaaagacatagactaacagactggttacacaaacaggaaccaacattctgctgcttacaggaaacccatctcagggaaaaagaagacactacctcagagtgaaaggctggaaaacaattttccaagcaaacggtctgaagaaacaagctggagtagccattctaatatcgaataaaatcgacttccaacccaaagttatcaaaaaagacaaggagggacacttcatattcataaaaggtaaaatccttcaagaggaactctcaattcctgaatacctatgctccaaatgcaagggcagccacattcattaaagacacattagtaaagctcaaagcacacattgcacctcacacaataatagtgggagacttcaacacaccactttcatcaatggacagatcatggaaacagaaaccaaacagggacacagtgaacctaacagaagttatgaaacaaatggacttaacagatatctacagaacattttatcctaaaacaaaaggatataccttcttctcagcacctcatgggaccttctccaaagttgaccatataattggtcacaaaacaggcctcaacagatacaaaaatattgaaattgtcccatgcatcctatcagaccaccatggactaaggctgatcttcaataacacataaataatggaaagccaacattcacgtggaaactgaacaacactcttcttaatgacaccttggtcaaggaaggaataaagaaagaaattcaagactttttagagtttaatgaaaatgaagccacaatatacccaaactatgggacacaatgaaagcatttctaagagggaaactcatagctctgagtgcctccaaaaagacactggaaagagcacacactagcagcttgacaacacatctaaaagctctagaaaaaagggaagaaaattcacccaagaggagtagacagcaggaaataatcaaactccggggtgaaatcaaccaagtggaaacaagaagaactattcaaagaattaaccaaacaagtagttagttctttgagaaaacccttagctagactcaccagagggcacagggaccacatcctaattaacaaaatcagaaatgaaaagggagacataacaacagatcctgaagaaatccaaaacaccatcagatccttctacaaaaggctatactcaacaaaactggaaaacctggacgaaatggacaaatttctagacagataccaggtaccaaagttaaatcagaatcaaattaacgatctaaacagtcccatatcccctaaagaaatagaagcagtcattaatagtctcccagccaaaagaagcccaggaccagatgggtttagtgcagagttctaccagaccttcaaagaagatctaatttcagttctgcacaaactatttcacaaaatagaagtagaaggaactctacccaactcattctatgaagccacaattactctgatacctaaaccatagaaagatccaacaaagatagagaacttcagaccaatttcacttatgaatatcaatgcaaaaatactcaataaaattctcgataaccaaatccaagaacacattaaagcaatcatccatcctgaccaagtaggttttatttcagggatgcaggtatggtttaatatatggaaatccatcaacgaaatccattatataaacaaactcaaagacaaaaaccacatgatcatctcattagatgcggaaaaagcatttgacaagatccaacacccattcatgataaaagtcttggaaagatcaggaattcaaggcccttacctaaccatgatcaaagcaatatacagcaaaccagtagccaacatcaaagtaaatggtgaaaagcttgaagcaatcccactaaaatcagggactagacaaggctgtccactctctccatacctattcaacattgtaattgaagtcctagccagagcaattcgacaacaaaaggagatcaaggggatacaaattggaaaagaggaagtcaaaatatcactttttgcagatgatatgatagtatatataagtgaccctaaaaattccaccagaaaactcctaaaactgataaacagcttcggtgaagtagcaggatataaaattaactcaaacaagtcaatggcctttctctacacaaagaataaacaggctgagaaagaaattatggaaacaacacccttctcaatagtcacaaataatataaaatatcttgatatgactctaactaaggaagtgaaagatctgtatgattagaacttcaagactctgaagaaagaaattaaagaagatctcagaagatggaaagatctcccatgctcatggattggcaggatcaacattgtaaaaatggctatcttgccaaaagcaatctacagattcaatgcaatccccatcaaaattccaactcaattcttcaacgaactggaaggagcaatttgcaaattcgtctggaataacaaaaaacctaggatagcaaaaactcttctcaaggataaaagaacctctggtggaatcaccatgcctgacctaaagctgtactacagagcaattgtgataaaaactgcatggtagtggtatagtgacagacaagtagaccaatggaatagaattgaagacccagaaatgaacccacacacctatggccacttgatcttcgacaaacctgtggaagaaagacagcattttcaacaaatggtgctggcacaactgattgttatcatgtagaagaatgcaaattgatccattcctatctccttgtactaaggtcaaatctaaatggatcaaggaacttaacataaaaccagagacactgaaacttatagaggagaaagtggtgaaaagactcgaagatatgggcataggggaaaaattcctgaatagaacagcaatggcttgtgctgtcagatcgagaattgacgaatgggacctcatgaaactgcaaagcttctgccatgcaaaagatactgtcaataagacaaaaacaatgagaccaccaacagattgggaaaggatctttacctatcctaaatcagataggggactaatatccaatatttataaagaactcaagaaggtggactccagaaaatcaaataaccccattaaaaaatggggctcagagctgaacaaagaattctcacccgaggaataccgaatggcagagaagcacctgaaaaaatgttcaacatcattaatcatcagggaaatgcaaatcaaaacaaccctgagattttacctcacaccagtcagaatggctaagatcaaaaattcaggtgacagcagatgctggcgaggatgtggagaaagaggaacactcctccattgttggtgggattgcatgcttgtacaaccactctggaaatcagtctggcggttccttagaaaattggacatagtactacaggaggatccagcaatacctcttctgggcatatatccagaagatgtcccaatcggtatgaaggacacatgctccactatgttaatagcagccttatataatagtcagaagctggaaagaacccagatgcccctcaacagtggaatagatacagaaaatgtggtacatttacacaatggagtactactcagctattaaaaagaatgaatttatgaaattcctaggcgactggattgacctggagggcatcatcctgagcgaggtaacccaatcacaaaggaacgcacacaatatgtactcactgataagtggatattagcccaaaacttaggttatccaagatataagatacaatttgccaaatgcatgaaactctaggtgaatgaagaccaacgtgtggacactgtgccccttctcagaattgggaataaaacacccatggaaggagttacagagacaaagtttggagctgtgacaaaaggatggaccatctagagacttacatatctagggatccaccccataatcagcttccaaatgctgacaccattgcatacactagcaagattttgctgaaaggacccagatatagctgtctcctgagagactatgccggggcctagcaaacacagaagtggatgatcacagtcagctattagatggatcacagggctcccaatggaggaactagagaaagtacctaaggagctaaagggatcttcaaccctatagatggaacaacgtaatgaactaaccagtacccaggggctcttgactctagctacatatgtatcaaaagatggcctagtcggccatcactggaaagagaggcccattggacacacaaactttatatgccccagtacaggggaatgccagggccaaaaaaatgggaatgggtgggtagggaagttggggggaggttttgggggacttttgggatagcagtggaaatgtaattgaggaaaatatgtaataaattttaaaaaaagttaaaaatgaaaaaaaataataaatttgtttttaaaacaaattaaaattgaagaataaataaaattccactagaaatatgtcactcaacaatctcatgaagaaagtttttcccagaaaagaacacacatagctattgattatctaataccgaatgctcagcccttaaaagcatatatacatgggctgagtaagttttacttagggaatacatatgcacatacatatacatatatgcatataataataataataataattaatgagcaagtaggccaaaaattgtaaagagcacaaggagggcttggaatggggaaaagaaagggaaataatgtaattgtattgtaatctcaaaaaatacaagaataaaacgtagtcccatgatggtgtgtctattatacaggagggtaacaggtatgaccaaccattgcctacatacaacagacagacaaattctcactctaaaataatctgcattaggaaaaatgaccagaagccaacactgattgcaacagaatcataatgctttccaatgcaaatgttactaaagccttgccttttttaagttgtgagtgaagagactggctctgagaggatttatctcgaccaaacttccacagccagtatgtgatggttaggatttgaaccagggacacactgaatccaagaacatgtaataatgctctctgagcctcagataaagtctccctgtggactgtgtagaaccgcattataaggtcagagacatgtacgggcaagctggcaaaatggtggtttccccattactgacaatgatatatgattccagataataaaagaagctttgtgaaccagtgtgtctcttccatagtgatctgaaatggtcctcacagcaggtacctaactatgctacaaccaagaaagcagtatgtagcagagccacaaataacttgaagaagaggacagtagttgtgagtagttgtggggcttgtatggttgcggaatctgtctctgcaccaggaactagtctcaatactgatccatacatggttaacaagtaaatgggggagaggtaaatggggcccaaaaagtcatgcatcactctgagcccttccactgtggaaggaatctacaggctgctctccaaatcagtcaaagggctattatcataccagctgtgacaaggtctggtttcattacaactgatattactgtatttcttacaaatagcttattaaggcaattatcagtcattagcacagtagcctgagcatcagtacaatcacacacattaataaagcataatttagcaatgcaaataaaggcatgcatggacttagctcccttgtggggaactcatggttcctgctgaaaaaaatctccatggtatgacagataggagtgctgtggggtccaaccatccccacagctatgaggttatacttgccaaggaactgaactccacacaaagcctgagtcttaaagaaagatgaatagatatttgatgattagaagttcctagggcttccaagggacaaaaggactcccacatattgaaaacaaaagaatatgaagggattagacagaagaagaactgtggcttggcgatcatggtaccaagtagggctagggaaagaaactgctaacttatttaggtctattttagaactggggggtgtggtagtgggagagtgacaataacgattacatagtgatctcaggagctggtgcaaattttagaaaaccgcagtgatgagagaatgatggctgcggagacaaaggaggataccaagtcatagattagtccaatcttccacaccacacctaatgactgtgtggagtaaaatgtcacaggatatgtcaggtacaaaaccctcaccaagtaacagagtacaaaagtgacacaaagacagtgactctgagatttttacctagcatacaaaaggatgtcattgaaaaaagactttcaacaccattttggtagatttaatgcaggtggacaaatgcaaagaacatttaacagtgtatatttatagatacataagacttatttttattcacactcaaggacacttaatacctaaagtccaaagaacatgtaccagatagttggatggaggacaaagcccttactaagtgctaactacagtcttaaattctcctctgttgtttctgtgtgtatgtgtgtgtgtggcttctcacctgctcataattcatgatggtctcttggttatattttgacaatattcctttggggatttcatatcctttactcatatatctctcagatcctggtataagcttgtctttctctctggtactgtggtgtcttttctctccattcaaggatctagagaaactgtagctctaaaccagagcctaatgtatctatccagggtgcactgccactggagaggtctcatcccattgaacattcatctctgatatactatgctgtaggcacaggaaacatagagccactggtccatccatcagatccttgaggaattggctcattactgagcctccatttgtgtgaagcactcaattctgtaagcacagtcaagcctcaaaagctgtccaggccagaggacaacacggagtaagacattttttcacagtttattcactcctcaacaaataagtactgtaccccaaaaacatatcagacctatgctgcacagtcaaacagaaataaaacaagaaccatctgtccttcaaaacataaaagcttacttgaggacaaaaataagtgaaaaagcaaaaaatatgtaaatctgtttaatttccctggttatcttcgaaattccatcagctcctggagctgaccttgtgccagagctctacatacccaggttccaccacaagtgagctggtatcccaagagtgctgacacacatgagagtacaggtgacactacaacttctattcaaatttctggcggaggagggacctgcccagatccatcaggacatagaaaccaagtgagaatctcaggtgctaaagactccaaagaaaacattgacaaaacaataaaaaaaaatgcaaaatgcaaaaagctcctaacccaaaacatccaggaaatccaggacacaatgagaaggccaaaccaaagcatagtaggtataaaagagagtgaagatttccaacttaaaggtccagtaagtatcttcaacaaaattatagaagaaaacttccctatcctaaggaaagagatgcccataaatatacaagaagtctacagaactccaaatagattggaccagaaaagaaattcctcccatcacttaataatcaaaacatcaaatgcacaaaacaaagaatattaaaagcagtaagggaaaagatcaagtaacatataaaggcagacctatcagaattacaccagacttctcaccagagactataaaagccagaagatcctgggcagatattatacagaccctacgagaacataaatcccagcccagactactatacccagcaaaactctcaattaccatagatggagaaaccatgatattctatgacaaaaccaaatttacacactatctctcaacaaatccagttctacaaaggataatagatggaaaactccaacacaaagagggaaactacatactagaaaaagcaagaaagtaatctttcaacaaacccaaaagaagatagccacacaaatataattctaccgtatttcaaaaaacaaaaacaaccaggaatgaggaaacaatcattattccttaatatctcttaatatcaatggactcaattccccaatactaagacatagactaacagactgaatacatcaaaaacaggaccccgcattttgctgcatacatgaaatgcatctcaatgaaaaagacagacactccattatctgtaacatctcgctagttctgtgtgtctctggaggactctgtttagtggatctcacatgtccataatgtcctttcctgtcaactattctatttaaccttcacaatggctcatgactacaagaaactgtcaatcctggtggcttcataatatatccaagcgacacagagacatcaaagtatgggctgtgattttaaactctgatcccttactgcttttaatattctgcccagcatcatcatatccctaataggaacacctaagaaaaaaaggaaggaatttgctgctggctatacattgaggcataaaccaaggaagatgcaaacctactgcctgaagaatggattagaagaagctagaatgtctcacagccttcatccatgccaagggtactctcatctgcacccttatcaagctgtccagctgtccaacataaatgccaaaattcttgttcttcattaattccctggaatccttcatgcaaacctcattaacaggctcagtaattgctctgtgaatattgcccatttcccaattatgttcctttctctgtgtcaggagaatgccatcaatggaaatgtgccatgtagcactggtccattttatgacaaatgctttgacagtgtctgccacaatacaaaaaattcttgcatccaacctccattcttgagaatttgtgatgtgcaaaatgcaggccctgcatccatggtccccacacataggttcccaacttcaggaaagatactagctaaccaagagaagaaaaaatttcacacagactactacttttctgtgaaatcccccagacaacacaggaaggtgtttccattgtatgcataagcagtgtcctgggttatgttcagcatcttgcttctgcagcaaccaatgaagggttgctcatcagattagtcctcagagaggagcttgggaagtcagggattcggcagcttatgatgtagatcatcataagcacttcttatgagactatcaactgctcatcaactccaaaagcaggcaaccctcctgagtccaattatctgcaaacttttcctcttctgcattcaattttatcattaagtgagcacacaaagatatggcctggtgttcagttgcctgcactgtttcacaaacagaacaggtccaagtaatgacagctcatggccaggctgagccagtgatccctgtggcttttgagataagaaatgagaagcaggtagaggaagaaaaaaaatcacctttgagcaattcagggcagtgtccagatttttcatgactgctttcattctcagcagctaccttagatttatcaaagacacagatagtatcttggaccactcaggctgctgaacaaagcaccacagcctgggtaactagaacacagacagacatttcttggtcccagttctaaagactgaaaggctaatatcaaggtactaaggtctcctgagggtcagtttacagacgcatttttaccctgtgtctttacacagttaaaagagtgtaggagctctcctgtgtctgttgtctgagagttctgatcataatctcaatggctcttatctatgcttccctcccaaaggcaccattttgcaataccagtgtcacactgggagttagttacaagaacgaattggaaaggtagatgagcaacccattttgagatgtcagtagatactttgaaatgcatggacagacagacagcaaaacagatactgaacatgtcataggcctccaatcattgtcatataagtgggctcaatatcctgaaggctctgcatggaaaggtagtctgatctaactgttaaacttttctacctagatctatatcaaaaatcaagctcttctcttcaatttatctttactccaataaaacctatccctggaggtccaacactgtgtgtgtgtgtgtgtgtgtgtgtgtgtgtgtgtgtacctctcacatacacataggtacatatatcatctatgtgcccatccaagcatgaatgtgtagccaaatgtacactggaggctcattagcctccctagactgctcctttgttagtcatacaagtttctcataaagtggtatttaccctcagccttactgaaaggcccactctttgcatatcctggcaggtactcacacatacattcatagaactgatgctctctcaagccctctgcatatattaattcattttatgctctcaatagccctagagagtggcagtgtgtctggtcactccactgtaaagccagaaaaggatgaaataataagtccaacgtctaccaaccagaaagcagttccagagttcaagctcacaggccttgttctgcactaggtttggaattctgtctgatgtcactatttatggacacttcattgagctgtctccctctctcttccgcctgagctaaagatctacaaacttcatgtttgggtatctgtctcaggtgtcactaccactggcagaacttagtcactcatctgtctctcctttcttagacaagatgatcctttgtgcagacccaccatttctgtgactgtgaaacaagccaaaattcacaatgtaacaggcctttcaaataatctcagggttacataccagagaccaagcaagacaacagatcaaaagtccagctggaactatactcagctgccttgttaagctggggtcagaagatacatgattgctaaacagctgcctaataaatctgccctctcatatcagatggactctctctgttagcatgcagcaggatgatttctgttcacaaatgcttcattgtcatttttattacttatcctttaacacttccatactaggtcaatattatggaggggtcagcagaaaggtaggacaagataattatccaactatgacagatggagaagttgtggggtgggggtcacaggatgataaaagtcagcttcaatccatggaagaaggacctatctcataagggcttcaggtcaggtactcattttagaaccctctgccttgtttctcacctaggaaatgaagacaagactgctcatgtaactgcccttgagttactacatgttcctccttgcagtcccttccacagggactttttccatatgactattccccatttcttcagtacacatataaagaccaaaactcaatgtctctgcttacttgctcatagtctgctgttccaagacagctggattctgtcactcattactcaccttctctatagagtaataattacttctgcatctttgtgattaaaatacctgagaaacaatttaagggaataaaactgtattttagctcacggcaatgggagtatatggtggacactcttcacacaatgccagacaggaaagacaggatacaggttagaagcaaggcaagcggtgatgttcaacggtctgtccctagtgaatcacttccaccactcaggctccaccttctaaaggctcctatgcttcaaaacatctcaagctagagactgaacatccaaagcataatccagttgggaataattccgattaagatcataacagcaagtcttttctaagtggacaaagagggaggaagtcgtagcgggtacactagatagttcctggtttgggtgcaaggcagcaagctacctcctacctcatccatgtggaaaacctacagtggagacataccaaagctcaacaaaggtgcctaagaaaactgacatttccatttttctttccccatcctttcccctttagttgtcaatcacatgtctgcgtgacatgcaggtagtaatactggtccatgttccacaaaccaaaactgatggctcatcacaaacatgttcatagctttttatgtagctgtttaattagatacttaggatcagatagcccagaaacttgtccaagatacccaagtgtggggcagtgagctgtgataggcagcctggtcccaggtccagctcaggcttagacccagagaccctgcaggtgactgtcaccagcaaggaatggcaggtgttcggccatactccttgggcccttggctcctgttgaagctacagcctcccacaccccccacccctgccagagaggtgtgcagccatcagtcatataggagcagcaccaagtcctcccacatgcaaataaggttttctcaaagctcccagaccaagccaatgagaagtacctactgtcagaccctgacctaccccaagactgtatattagaatcctatccagaaggattaaaggtgtgcgagaatgcagaagtggtggaaacgactttgcctccctactcgcacttgctctcctatgcatgaactctcgcacctggccaggccagtgaaatctgtggaaagcctccagtatacaggcccatacccaacgatacagcaaaatcacaggctcagccatgacccctcaagaatcgagtggatcatctatcttctaaatgctttcataacttgtgtggctaaggctgcagactgtccctcattgatatttttgttttacatccccatgccaagaaaggtttccctgattcccttggaatatgtatgcttagtaaatactttcattggttgatgatccccacactccaaaacaatctggaagacaatccaacttaggaaaatggggtaattaatttcagctggacctataaggacgcatactcaaggttgactactaatgtagctccacaggcatataagcatgtgtacacacacacacacacacacacacacacacagacacacacacacacatggcttctgccaagaggctttcaaattattaagtaatcaaaagcttttacccggaccatatcatacatcttggctattaaaaacaaaacaaaacaaaacaaaactgtgattgcactagcaagtgacttcattatgtacaaacattttcacagtaccatattaagcctgttactcctggctaacttccctgtgcccactggaactgtcagctgtgtaaggatacagacgttactcctggctaactttcctgtgcccactggaactgtcagctgtgtaaggatacagacgttactcctggctaactttcctgtgcccactggaactgtcagctgtgtaaggatacagacgatgtgctttctttgtgtctgcctaagacctagtacactgccaggtgcatagtataagccattaatcatcatctaagttaatgttctcactacatacagaaaaaaaaaatgaaaaattacaacagcattccaaagttcacaattggggatggaacacataactgagaataaagatgaaaccatccatcccctcagaacagagcttcacccattccatcaaataagtctcacgtcataatgttttcctggttgttgtcttccaattctaaggactgaaccaatgacacatcccccagatggtataagtgtgcacaagtgcacgtgcatgccactggctgctgacccttgtattctcctcccctgacacagcaaagaactttccagaaagactctttgtggataaagttctttctgctgccttctagggcaacacaccgttgaccaaactgagtcatatgcattccatgcctctgtgtcacccttttctcaagggtaagacttctaaggctaaccccagaacattcacgttctctatgttccttgcctgccctgttaacagctattaataaccgctaccattccttgaatagccttcaatctcaaggcatcattctgggcactgggtcaggtacttatactttcactgcaacagaatattttgggcagatagctttttgttgttgttgttgttgtttgtttgtttggtttttttttttttttccgagacagggtttctctgtgtagccctggctgtcctggaactcactctgtagaccaggctggccttgaactcagaaatctgtctgcctctgcctcccgagtgctgtgattaaaggcatgcgccaccacgcccggccagataactcttaaaaaacaaacaaaacaccaaaaaagaaaaaagagagaaaaaaaaaaaaaccaccaccaaaaacagcaacagatcacccaaaacaacaccagatcaccaacaacaccaccaggtttacttggtttgcagctctggagatttatagccctgctagatttacagatttactaaagatggacagcagtgtgagaacagacagatcacatgttcaaacagaaagccagagagctcaggagttccacagaggcaccttgaaccattccacggtcacactcccagtgaactaaaagctctttctacaacccaccttttaaagctccacccccaacctcacagaattggggattaagttcccaaatcttgaactcttggtagtcacaaactctacctaaactatccttgaacctcacacacagcattatttcatttaaccttgacaacggcacttaaaggcaaacttcatttctcagatgaacaaatgatactaccaaaaggcagccacatactttcaataagcccaagccaggcccctgggcgtagctaacattttattggccaaccttttttaattacgtgtacttcgttgagtccctaacttatctagccatttattttttcctttcacttataagcatccattcaagacttatgctgaacccatatgattcccacttcacacataaggattaaatttaacaagctgtagaaattaaaggtctagccaattaaaaagtctaaatactttctactaataatagcatcatgttggaatgagagccaagtgatggaatttagcaaaagtgttcatagcaggacctgggcacacagtattacctcaatatatgttagtttatgaagttaaatgagagctatggtacaccaacacagcatggcagagttttaaagggcaaagaaaaaagtgagttgccatcataagtcaagtttaagtttactatacatcatcatggagacagcatgtttggtctttgttttcctaaatacaaggcaggggaaagagaaccagtcacctccagaaatgagtcttcaaatgttaccagttgtgattttagtagctggtgatttaaatgagcaatacaaagcctcccaggcaatcctcaagtcttaagcagagaatggtggcttttgctatagaaatctatgcagagacaccaaatgaccatgctactacgaggaacaaacttggtaaagaatacactgaagatagcatttttttcatgccaggatgtcagtggccatcaaatccccagttatgaagtggttacaaaacctgatgtataaggttcaccatgtttgtacccatcacccatccatcctgactccatcattggaagccactaaagtttctagctgcaattgccaaaaacaaactgtagatatagatatgcaagcatgatagaacaacagatggacacagtgaacagaaatgctgcaactgggtaaaggaagacagaaaagacattgagggaatggccagagcctgactacgaacaatagggctcaggaactatgtccctcccatcatacactcatgagccccagtgctaagggcagatagacattccatccaggatattgaatgcagaggtatccaatgttgtctagtaggcatatagacctttccccccttttttttttcaagattttattcatttattttatgtgagtacactgttgttctcttcagacacaccagaaggggctatcagatttcattacagatggttgtgaggcaccatgtggttgctgggaattgaattcatgacctctggaagtcagtgctcctaagcgctaagccatcgctccagcccaccttttccccttctatgtgttcaatcccctatgactttctattaaaaactctatgagaaaacctttaagactaacctaggtgataactcacaattatttctttatctcaaaaatcattaaatttattacatgtgcaaacatctttgtaaacttccaaataagctaatacttaaaaaaaaaatctaggaaccagaacctagtattttgagcctcccaaaatagcagcctttccaaacagttgaatgagagacctagaattgctaactagaagtggccttggaaatcagctcattctaccagcgatgacagtcatgcccaggattatgcagaagagccatccttgcaaaaaagaaaaagaaaaagaaaaagaaaaagaaaagaaaaagaaaaggaaagtttcttgaatatacacagcttatcccaaaacacttgagtttgttttaaagaatattattccctcccctgctatatataaattattggcagtgacggcataagataaatcacatctctaaagaatatggtttaaaacaaagaaaaaacaaacagaaaacaaacaaacaaaacacacacaagaaaacttctaagtaatcccaaaagaggagatgggagaaatcaagatggtgctaattcactcctatacaacagacatgaactcaggcctgccccacagtggcctgtatgagccacagaagtgggaagaacaaagagcctgggaagagatattcttttaaaacagagttggggggatctgcaaccctataggtggaacaacaatatgaactaaccagtaccccccggagctcgtgtctctagctgcatatgtatcagaagatggcctagtcggccatcagtggaaagagaggcccattggttgtgcaaactttatatgcctcaatacaggggaacgccagggccaagaagtgggagtgggtgggtgggggagtggggaacctttgggatagcattggaaatgtaaatgaaataaatacctaatttttaaaaatgataaaaaaattaaaagaaaaaagaaaatagatcaaacagaaaaaaaatcccaaaaaacaaacaaacaaacaaacaaaaaaaccaacaacaacaaaaaaccaaaacaggcagctgacaaattgcagagagcactgaagacagatctagaaggaagctgtctgaattgtcgggctcagaggttctcactctcagagcaataggggcaacccatgggcatttgctaagaggttccctgaaccatcccaacttcaggttctgtggatctggatgcagcgcatgaatggacacctagaaaaccactgctctggaaggggccctgtagagagggccagagaatggaacaaaaagggtgtgaaccaatgacagaactggagagttccagctatttgggtatatgggaaacagaggagagatttgaaaaaaaaaaaaaaagaagaaaagaaacaagaaaaatgaaaaaagaaaaaaaaggcattggtgcaacttgcaggaagagatgaaagatgaagagatcaggagaatgggtactaagttatgccttgccatggtcaatgagaaggtactagcaaaacagatgagagaagatcctcacaatcaaactagtgcctctatctatggaaagccacagaacgtggaggtgacctgcttttaagcactcataaacagtgactgtttcaatgcaaagattcatatttcagggattcccaggtatcctcttgtgtggactgggaggtgtctggggacagaaatggccaagagcatggtgcagcaaagttcagagaagggatgggaaagggcctttaaaacccacattgaggtaccctccacaggcacacaacagctagggtaaacaaaactacatgccaaaagaagccaattatttccatggcacattatacccaaaaaaaagaatagggcatgacatataaataatttggggctgtaaaaagaattaaaggagtccatatatgttaagcaaaaagaataatgctagtacaggaaaacactaaagaagaaggaaatgatggtgatggtgatgatggtggtgatgatgatgcaggtgatcaaggtttccattcagctgccataacagaggacaaaagaatgggtgttattgaacaggagaaacttactccccaccgttctttaggatgagaagttcatgactagcccatgatattgtctatctggtagcacctgcaagtatgcagaaagggtaaggtaggtaggtctctggggccttttctaaaccaagcatgtttcaaggcttctttatataccatctcatgggttagggtttcagtgtttgatctgagagtagacaatcaggccgcagcaaatgatggcattggcactgagaaagtaaaatctatattgaggttactatttaggcagagatcatgcatgcacacagccaaaaagtgacaaagacatgagaaagattttatatttaggtctctgcataccgcctctgaccatatcttgctggtcttccagccacacagtactaaggctgaggactgcatgctcgagaagaagagctggagaagtcatgggagagtggaaagagatgctgaaaaggccagcagcaagcaacagtgatgcttttttttcttcctttgctgtgctaaaacctaatgtgcaccatgccagacagtcccagatagcttatggggcccaaagaagtactctcgaggttgaccgcaacttccgtgcaccagctgatgaagtagtagttttattttaagtaaatataatattttgtacacacaaagaaagctgtttctgtctcctctcagctcccctcccagcccggaggccatcataatcccaagtacaagcacagaactagagaaaagacaagtgtatggagccagacccttgtaaaacacacacacacacacacacacacacacacacacacacacacacacacacacacacacaaataggccagagtcctaaagaggctaagcccaaacttgtgagctttactcatacagcccctccctgtctgacgcaggcatgatccccagtcaaacatgtcatttccaagtatcagccccagggtaccaagtgacaagtttagttaaaactagcttctcccttcacatacctcaccattttttctcctttcttgtagttcccactgactgtggctttcattcttttggtctttgttctttttgtcttttgttttgtattgtttgtttgttttttttttagttttttcaagatggtgtttctctgtgcagccctggctgtcctggaactcactctgtagaccaggctggcctcgaactcagaaatccgcctgcctctgcctcccaagtgctgggattaaaggcgtgtgccaccaccgcccggctgtggctttctttctttcacctaacttccactcaggtttcaggattctgaatcaccattcctttgaacattctgattacagtcctaacacaaaacctcttgtgatactgggcctttcccgatcaagcattttctataccactactgccagcaactgtcacactggccaagctacaggccacctggccacatgcccattactcagctgtggttctgatatcaccagaaaacactcaggcagctgcttcttccacacataaggcaaagaaacagcctcgctcgaaagcccaagcctgagtacacagatacatcccacctatggggcaagactgatcagaaatggacatgagcaagcctggggaccaaagtcagaaattaaaatgcagagaccatgacaagctcaagtcttagttaacatggggccagctaatccactggctttgggggggggtggctctggaattccgttgcagaactcaaaccaagaagagctgtccacgttgaggcaactccatggaactcaggaaacccaaaacctacccacatttggagtttctggcagccacccattaccttctctggaacccagtggaactccacaggtaaaaagcagaggagcctgaagtagaggccctaatccaaatccaaactctgtaggcagactgggtgatctgggtttgctgactggtaccccagccacaagcccctatggaaaccatacctggtgaagtaagggctcaataagtgctacatgctattatactgctaataatgaactaagcagacagagcttatagtatgtcccagacatggatgtgatccaaggtgggtagacatgggctcttgatgatttagtaagtcccatagattacaaaactccaacatattgcagatgattctctgtgccctactctaggggaaagatgaacttaggaccagaactccaccccaaccccaacccctaagcagttgtctcatcaaggaaattataacatttcagcctaaaaaactagttgaatttatgttaacctttaattacatactcccattgattagacttttaaatgtcccagtattgtgaaaatacttaaccagttagaatatatttaattcagcaactctgtaagacccacgctcatgaccttctctaagtcatgtgtgacccactagaagtcatgtgtcaaggtgtagtctagttcctaaaacttacactgtatttgtagctaagtatctccaaagaggtgagaggtgtaaaaaaaaaatctcttgttagaatgaactttaatcaaatcccaaagaaagagatcaagatacgagtacatagggattcactgtgaggacacagaaaagcattgtctccaaggcctaagaacataaccctatggccaatgccttaatcttggtcttctggacatagaattatgaaaatatgaatgtctgtagcttaagcccctgggtttataatcctttgccatagtgggtctactaaagtaccatgagaggtgaggttggtcctagtgtttgactgctgtcattttactatagaaatattagaattccatgaggctggatgacctttacaggcttctgcactactaggaataaaactggatcccggaaatcaaaataaatctgtcactaactcctaagatctgccgtgtattcaacaagtatatactcaacatctgtgttctactataaacattaagccaaaccatgctttgtataataataataataataataataatgtattaagccataacagtgaatatttgagagaaagatgctgtgggaaaagcatctttcatttcccctctttattaaatccatgaaaaatatctagcacaggaaagctacaatcactgaatcaagaggttccaccatgtcagttttcctcagcaacaaagaaatgaatgaaataatgccattagcatataggcaatatacatctatcatctgaagttagaagccaaacctagttcatactatcacaatgctcagggacatggatggtgttttcttcacccagataaactcacatgtagtgagcacacactgtaagggaaaattctcacagaaccagaaggaacagacatagaaaccatagctgatgtttaatatatgccgttatgatgtgtctatccagactttatatgagtgtgatacttctgtggttgagaagcagccacatattatactttgcatgagggagagggagtggcaggggtaaccatgatggctagtttgtacatattttcccacttgtgtatagctaccttagcagtgattaactgtactggttacctacaatggtagctgagaagacatcacaattccacagccccacaagtaccaagatatattcacttcattcattaatgtgcccggtgacattcagggcctggggctctgagctgcctaacaatactgcaggtgagaaataacatttgagggtctgatgggatttgccatatgtgttattcacgctaaaaacttgctggcactactgcaaaccaacagcctaaagagtcattgtagctaagagctgagtcagatgccaagttttccagagcactgagcatggagaaacttcagcctggtatctttcaagaaagaagaggtacactagtatccttaatccagaaaaacagtagtcctgagatgaaaccggatatatgagctcttggctcacacttgatacacattagacaccctaggtttttacttttggaggaacaatcactgttatatatgaggagactcttgatgagagcagcaggtagtattaattccattcctcttttgcctaactccatctaatctgctccaacctgagttgctaaggtcacaagcaaggccctgaattcatatatgcaatttttcaaggtagactgttgtatattcatacatatatgtaaaagaaagcttgtggggaggacattacatcctacagcctgcaacagagacctataaccactcaaagctgtcagcaactggagtacatccagatcagctgctccctgcaatgtacagttggtacagaaggcatgtttcaaagtggggacaaccacatttatctacctcatcagagaaaagttagtcattccaccagcagtgtaaagatgaggtctgggcgtggtcctgcttgttgtcactaggatctgataccagagagagtcttagtgatgctgactcaggtacacagtttactgggacaacactaaggccaagagtgggtgaggagagcaagcttaaccccaggacaccacaggtgataagaaccaagcaagttagagcctaaaacctatatacaggcagtacaaggcaccttggaaaggaatgtgggatctgcacccctcaggctagtcactgctctactattaagtgggatctgacctgtgttcacccacaagtcccactgtgacatcccatagcccattcacagtagtgtattgttgttcaagtaaacttgcaccctcaggagctttatatgtgttgtgcccagtacctaaaatcctttcctgtcctattttggcactgatggctttatcagaggctctgggtatcctcccaactttactgaatagacttcctggatagactagccagttcctactatcaccacctactaaatcccaccaactggattatttgcaccaatgcattgatctatttttaaatatattatttctaagattcagaggtagagtaaatgactgttgcatgcaaggccttgtattcaatcctcactatggagagagagagagagagagagagagagagagagagagaatatttctgtgtatatatgtctatgtctgtctgtctgtatctatgtctctgtgtgtgtgtgtctatgtctgtttccatatgtaccactatgaaatacaatatccaagacaactctatttctctaaaagagtgcctcattcataacaggaacaaaagttcttgctaactgaatgaactcaactgtcttgaggtttctagcttttgaatagctcattctctgtatattacttgccaataccctaccatattagtgaagtaacagtagacttcagactcttatactaatacactgcaagggacaccttccagggtctgaaatggacattctatcagttgtcttcctctttgtcttagttaggtttttatcactgtaaagagacaccataaccacagcaacttttataagaaaaaacatttaattgggggctggcgtatagtttcagaggttcagtccattatcaccacggcaggaagcacagcagtgtgcaggctgatgacatgatgctagagctaagagttctacatcttcatccacagttggcagaatgagactgtgccacattgatgttgcttgagcatataagaaagacctcaaagctcacctccaagtgacacacttcctcaaacaaaaccagacctactagtagtgccacttcacactagccaagcattcaaccacatgattctatacaagccattactaatcaaacccccacactcccttaaaccaaaaggtacaaattctcagccaggccccatcaacactgtttgaacatgggaaatcctgtgatggccatgtcaaaaaccacagggttttctgtaacactgagaagaaggagtggaaaggagaggggaggggagagaaaggggggaaaagagaagagaggagaatagatttcagggggtgaggaaaaggtggggagaagggggagagagatagaagaaagaataaatttcaacaagattgtgaatttgtaataacaaacactcatatacctgtccataacacccttaagaagggctaacttataggaatagaccagcagaagataacatgtgaaaaatgaaaaccaactgtgaacaaaggcggcgacatgaaaagcctttgtaaatcggaaaaacttcctgagcaagtgagggttactaagaacacctgagcccaagagagaggtcaaccccaccccaggaaactggacacaggtgagaacgcccacctctagtatccacaggtggcagcacagtgtcgataaggacaactgaaggaagtggacagtcacctgaaagagcagcatagtggccctggccagtactgaacaaatgttgttcgttttccgtgtagccttagggcaggaaggttccacacatccatgcaggagtcagcaaacattatggaaaaggtcaggttgtaaatccttgaagctctgcctgctgtacagtctcaactgtagctatgcaagctgaatgaagtggtaggcacatgggtacagaagatgcaatatgtgttgttatgggcctgcaaggctttattggtagacagtgaaatttaaatcatttgtcatttcctcatgatagaaaatagtattctttcagtgttgaaaatagtattctttcagtgttgaaactgttcacaatgtaaaagctcaggaaggcaaagtggctcacagtttgcagactcctgctcttgatcactacccagtattctctcttatcgcccaacttgaatgtaaggttctcttacattctatgctaagaccatatctgccagactctcctctactctattttcattcatttgtagaacagtaggatagacaatttattatcattatcattattattattgtgtttacttgagctagggatatgacttagttggtacaatgcttgccaaacatactaaaagcactgggtttgatgcttagcactgtataaaagtcccagcactagacagattgagacaagaggctcaggagtctaacctcagctatgaaataagtttgaagtgagcctgagctacatgagaccctgtttcaaatataaatcaatcaatcagtcaatcaatcaatcaatagtttgctttaatgaaacacctttggcagctaaattgagaaacattctagaacagcacatcccactaaggggtggactctagctgccagcagttcttctgagtagtatctagtgcccctgtctctccttggaaggcttctagatgtcactgatagtattatagaattaataccatccattttgccatgacagttccccatggcttttatttgcatcaaggaagggaggaaaatgaaaggaataaactactctccgaacagaaatatccatgtcatgctggggaggaagcacggacatccagtcctccagcagcagcttcagaaatagcccagacaacaggcctaccatgaagacaaacaaagcatctcatgggagaggaaaagggtgctggcctgggcacctgagggatggtcctcccttgtactgcacatgctgagtagaaagaaggactggagctgagagaatgccctcatcttagcatatcaacagagaataagctactcataccaagattcccacagatcacaaaagcatcaatcacatctactaagaacaagattactcacgcaaagaatgagacgatgaatgctggaagggatccattgattatttaataaaagtcttaattcccctggagccagaatgacttgccttaaactaacccattcacacgagtgagaagaaaaatgattactgcctgccagccaggtatgaggccctggcacatacatcactgtagagaaccgtgacccttactgacccatggcaatcacctgctgcagtgagtgagcaggggagacctggattcatacaaagtccaagcactctctgttgcataggatttaggagtctgtttattctgttcactgatggattataaaatcattatgggacaatccatggcccagagaaacagcttccatgacgaagagggttgaaacaatgctaactaacataggaaaagcatgcatccacacagaccggccttaacattctatccagctttaaagtaatttgacaagaatatcaccaaattggcatctaaattcaccaagtgaacatctaaaaccttaaagtctaggcaaattaagagaagtcccacaataaagcattttgattgcgacagcaaaattggtcctaaaaattaatagtctgttgtggctttacaaactataagactatttcatagcagtatacatataaaactggttttgaaggctagctcttaaaatgctgagaataatacaatttaatctctcactccagctttgatctatgaatgaaaactgttaggactctctgacaagaaaagtaaaaatatggtctaagagattcccttttcttttctcaatggtatccagtaatatactgtttctaatatgcttttggatatttgccatccagcattcctacagcagccctaggtgagaagtgagcagcatatataaattccatccctacccaagcctccccctggcagataccctaaattagttttgagaagtttcttagagggcagatttttccatcaaagagagaaaactcaacctaaattaccctttaaaacaaacagacaaaaatctaatggcttatgatctgtaaatccctgtcagacaaggtctgatatgcccagcactcttgttcttgatcactttattctctgttatgatttggatgtcacatgtttaaatacttggtccctccccagatggtggtactgtttggggaggctgtggaacctttgagaagtggaaacaagggagtcagtttgctggggtggaccttaaaggttatatagtacagcctggattctggctggagtcctctgcttcccagtacagagttaggagcaaacctagccaggtgattttaccaacctggacaggacttgttccagcccacatgcctttcccattgctgacctgagaaccaaaagaaaaccttcctcctttataaacatagctcactatcttatgactctgaccaggtcttgtgtaatccttatgccaaacacgagacagaacaatcatcattgtccttctcagagccctgtaccatcttctcttaagtccctgggaggaagtgaccacagcccatccagagcaaaagtgaatgctaagctagaacatcaagagatgccacagatataaggagacagagagaatcaggactcaaacagaaatcacagattccaaaatagtgacgaatcatttcaaaatgtaggagtgaatcacaagtctttcaaactgaatctcttggccacaaataaagtctgaaatatttaacaactgcctacagggcttcaaagagagtcaggttcctcttacaaaacaaagtttgtaaaatcaaacaaggttaccattatctaaataaaaatcccttttatactgctaaatggcttctcaccatgtgcaaagtcagaatcttgtacttgacgtagaaaggaaaagctttttgccctatttttgtccctacaataatgtaaagtaccaaatcccatttcttaagaagctccagcgtgtgcattgcgctggctatttgaaactctaaaatgacacctattattcagttagggattatgatcttgagcagtaaggtgtttttaataaaaaaataaaattaaaaatagatttaccacagcctttttaatgaaactagcagctctctcaagcttacagggaaaatgatatatttgggggattgctttatatattgacctgaaaagtactgttttaaaaatttcactaacattcacctttggagcaagtgcacattgttcacatgtgtgaatacacacacacacacactccaatcccccactgcagggatagtcaggcagtacacaggatcccaccagaacaaatcccctggaactttgcattcttgagagccagggaacagcaagtgaagcctagcagatgtgtgacaagtacggaaatgagtcagcctagtactgtccaatagaacttctggggacaatacacaaaattccacacaggggccctccacttcagtagtcattcactgcatgtggccacagagaccaaggaagcagatttttaatgtaatttaatttaattcattaaaggagtcacaggtggctagtgactacggaattggaagatagtttggatgctactcttaagagttctccccagcatggtggatgccttccttcctattttgtatcccagcatagactgttaccttcagatctccaaacaggcctgtgctttctactctgggttcttgctgaccccttaaagcatactcctggtcatgcactctaaacgtaggcagtcatctcttctgggaagcctctcctagtttttctctataaatacaacactcaagaggccaactttcttctccttccccattggtttatcggccacagcaagttccttccaccatacaaggcagcatcgtattggtggagagaatattttctgcagacagctgtccagcataactcctgtctttggcctatgctcattgccatctccctgacctcttgaagctatgtcctctttccaaaccccaatgctccatctgtaaaacgtgattactaatgaaagctttcccttctgattgttgtaaagagtacaggaatgatgagacacaggcaaatcattagcacagtgcttggcaagcagcaaagactcaataaaattgaccagtcattcttatttatcattgttaagagctattagagtgtgtacctgtaagtatggactaggtctttgccatccctggaacccactcctaacatacagcaagtactcgttaaagattaaagttgttaacaatgcctccagtgggtggacgccaggcctgagctcagctctaaggagtctcctaatgctgagcaaccagactctgaaggtagtactctaaagctctaagtacatttcagaagaagtaagcaggggaagtggggtgagatcacaagtccaacacttatgcagggctaactcaagctgcacagaaagtggtttcctccaccctgactgcctctcccaccactacccaaccctctaaccaggccaaatctgtagcaaaaaaaaatactagcagtggaagcaaacctcaccatgcagattagggtacaaagtaaatttaaggtctaacactagcctataagaaaaagagagtaccctcccttattcttctaggttaccccaccccttcctttcctagatggctacctggctctagggggaaaccttccaacttaccagaacatccttatagccctggattcccactgtgctctggaggtgtttgttcctggccctgaaagatgggctctcctgaggctcttctaggctgcttggttttattgaaggcaaatatggatgaacagcaggtgaaacaagcattaaaagtgattaaatgttcaatatacagccttccagcccatgtggactcccaaggagactgttcatttcccaaatttgcaatttttggctgtcttctgctggaagtgatctggcacagctgcagggccacgagctaaaaactagcaaagtgggggctcgcagcacacagcaagcacttacttctcaaaggactttcctcctggcatgcttcgggcagagaaggagttcagcagttctggctagaggggaaaggcagcctggagtgcagaatgcatagagcctatgcaggaagctaaaagcctacagattggggtaacagatcagaaatagctgccaggaggctgggacaggcagttgcctcctaggtgaatctggttctctttcctctctggtcttccattttctcctttatatagtcagagggtagtttctaccttttctgcctctttctttctttctttctttcttctttcctttctttcttcctcttcttaaagtaggaacttctttctgtttaaacaaaatcctagggggaagttctaatgcagaaaacacagaggtaaacaggactggaacacaactgtaaaattctggatcctattgattgagtctttaccctggcccccaaccccagaatctaggaagtgcagggcacaatattaggaagtcacattgtcagataacatcagtcacatcaagctcaactatttcaggctattacctgtgacagacctcaccttgcctgtttatcaggcagagccaagaaaaaggtttgtcctagtttcccaagcctctcttcagggagattctgactctgccacacaatggcaaagcctcagctgctccaaatgaccgcttcatcctgcaagcctgtcccacatgaaagatgcctacgtatcattcaacaagtcctgcgccacctccaggagcaaccttactccacgcctactgaccatatcttctgtgtgatgaccctgaggaaatacttcccagaagattgcacctcaataatatgggccccttattaatcatagctgttttccaaccccaaccaaacagcttccattgtcccagcaaaacacaaaagggttcacatccacagattcttagttcaaaataccaggaaaacaaccttgataagagtccgtggcttccctttgaaactttataggccaggcatcatcgtgtttatttctttcagcattatcctcaaatctcccacaaaggctcgttatggtctgagcactcaatgacttttccagactgagttccaactactgtcacaatctttgcaaaacaaaaaacaaaaacaaaacaaaacaaaacaaaaaaacaaaaaagcatagctctttcgcaataacctgttgctatgacaaacaccataatcaaaaccaacttggagaggaaaagatttattcagcttatatagtccatcatcaatggaagtccgggcaggagctccaggcaggaaccaaagcagagatcatggaggaacacggctttacaggcttcctctcctgcttctgctcagctgtttcctctatgacccatagtggtagtgcaaacctcacagtggattaggtcctcccacaaacattagtcaagaaaatcccctcaaagacaaacccacaggccaactggaaggaggaaatttctcaactgtggttgtgtcttcctgtctttcctgatttgccaagttgacagccaagattagctcccataggctacattattgcattagaaagttttattacaaaaatgtcaaccagagactgaagaaaataacaaaataactcagtagttaagagaacttgctgcccttctagaagatacaggttccattcccagcacccaatatgagtttcaccaccttctgtatccaatgatttttccacattccacaggtatcaaacatgcatatacagacatatatgcaggcaaatcacacataatgtagttttgttgctgctgctgctgctgctgctgctgctgctgttgtttttttaagtcaagagagaagaaaaggaagaaagcaaggacaaaggaagaagtggaaaagggaaatggtcaaaggtattcagaagagagttgctatgtatcctaggttagacatcaaaaatgaccggaccataaccattttgggcataacctttgctctactcagtctttttacacttttctctcaagaattattttggaacaaaaccccagcccactataatctgggtcataagtatttatttaacatacactgctgccctctctggttcctgtcatctggaagctgaatctagaatcttgatcaaatttacatcccttcaagacacacatctggctgcaacggcttagtctttctttatcaatatgatcatttttaacattcttactcaccttccaaaatatctcacatctatacagttatatattattactcttagcagccctcaacataactatgaacactcagaaatttatttaacaattcaagattactatttctaagatcagaactccataagaagcagatttcacaggctaacgttggtgaaaaaatagattcatgctgggcctttaggctcttttgttcctttaaacaaaatatagagctgaggagacggttcagagggtgagagctcttcaaaaagtatgagcagcatggccatgattacctgtaaactcagaatagggtaggggcaggtgttttactcagctctaagttggaaaaattagcaaacatgtgcccagaacagtggagaagaaaaatacagagctgctaattaaaaagtaaaccagggatctcctgacatacactagaattccagatagatgtacatgttgtagaatctagtcttttagaaagtcccaaccacttttcttggttatacaccaagattgcatgccaggagagcaaacaatccttactgttcactgttttacatttcatcattgagaggagggaatttcctgtgatatatgtgatgttggggtgtcttcttctagcactcccctgagacactgtctcttactaaacctaatgtttactctttatactaggatggttggcaggagctgctgggctagagttacaggtactccagccatgcccagctttttttacgtgggttcttgggattttaattcaggtcctcaggctggtacagcaagaacttgtacctactaaactatctccacagtcccacattttgctttaaaaaaaagaagaaaaaaaaaggccaaagacccagtatgatatgattcaatttttttcatcttatctcattctttcatcagcttaagtataagcacagtccttaccagcagtcacaaccaaccatgtctgaatgtggccagaagacagagaaccaccctgccaccacaccccaatccctactccctcacaagcaactgtgtgcctgttctgcttcatgatcaggagcttgctgaaaagcaaagatgtccactggccaattagcagtcccatgagaaaagccagaaacatgagtaaccaacatgaaatcaagccatctgtggctcacttttgatgaaatgatgtgctaaagtggtcctctactctgcaagctcacaatattagcacatgggtgcttattaggtgcagatattcagaaatctctactctacattttagatacccaatttttttctttatcattttttctaatcctttgccatatttatagtgtgtttatactttacagaagactgaaaatggggaatgatgactggattttaaatcagggagccatggagacagtcaggcaaaactttcaaggttaaaagtttgaggacagtaactacattgttgtcttcactcatcacaccctctagccaacactgattactcaaaagttattctaacattaatgaaaatcaagaagaggcctatcataatctgtttcaacacagagccaggccctgcctaacttggctctgaataaaccaacaaaggaaaggggtctattccaagagccccagggatacaaagatgaccaacttccagtgtacaaatggcacccaaattgctgtgtgttcctactttctacctacatgactgagggctccttattctaaaaccataggtatgtacttaagtacttgagtcacaagaccccagagtattacaggcagaggggacctaggtccagctccttagctcacgcttacctaagcaaagaactttctgagacatgtcctgttctaaattgggagaccattctcactgcctactagggattctcaaaggactgaaaggctaactggataacaaatttgaatcccttctctgacaccctacctatcttacctcttttttccacagtttatggatacccacctacttcacctaacctcattcctgaagccagaaaacctagtaccaatccatcctgggaaacttcttggttattacagaggcaaagatgggcatgaacgcctcattttacctagcctcctcgctggcaaaagagatatgaatgaagttactaaaagtactacatatgaaagccaaagacagtatctgacacccaaaagtttcggtaaactgttgtatggtgctattcttactaacatcagcacagttaccatcttcacaatgtacaattccacaagaggaagactttcccttctaattcccaggctccataattttatttagaaggatagcctggttagtacaatcctctgataaggtccaggaatacctcagtctgtgtctgagtggagggaatcaaggcaggcaatgtcagtgaatagctggctcctgggcttctcaactgatgtgtagagggtccagcagtttccgacctcctaataattttacccctatctgggtatggcctcccaccacattcctactcccaagaccctacatatagcataacagcatatagctgttactagtattatagaagcagagaggtaaaaccacaggagacattctgtgaagaagatgatttccagccagagcctcagagatctttctaaaccaggaggcactgaaactggcctgggagtgatggatagagtagaatactaagagaaccctgtttcctgaccagaccattctctacttccttaacctgacagacaaggaatcagacagtaagacttcaaagcccaaaaaagatcatagcctgtcatccagaaaggatagaaaatcatgtcagacccttcttttcagaacatatgtgctaaaccccagccaatgagttggtattaatttcagtctcaaggtggggctcagccttatgtctttggaaagaaccctatgttgtaaagtgtcaacttgatggtactggagaatgcctaaagaattagcaaagaaactattacctttggtgattccagaagactagcatgtggggcagtagagtgaagacctactctcgaagtaggcagcaccatccaatcatctcaggttacgtgcaacagaaacatggaaggagggggaacttctggctcatctttctggatgtattcttatgtagcccttggacatcaggctcctggtttgatgcctttggacgcttgaacttctacttcagcctcctgagccctgaggctcccagctactggacttagtcagctaccagcttcccaggcaccctatcttgcgtaagacaaccactatggtaccttgaaccttctgtaagtgtgaaagccagctacccaataagttcccttttataggtaggtaaacattatacgaatccattctctagagaacctcacctggagaaccagaacatctattataggcagttcctgagaaccatattcacaccatcatatcgctttttaacaagaggagtcattcaatggctatttgttgcacacccatcttgggatatactttgaataaagcaaaaatacatgtcctcattgctcattgttgctcattgtgcccttatagtaactaatccttgctggccggaccctgtagtacttaaaaggctaaaaggctcacaaaatgattcagctgagcttcaccatgctgagaagcaacctcacaccatcacatcagcactgcttgccaagtttgggtgaggacaagaagaaggggggtggtgtcagtctgcactagcaccaaaggagaaaggtatataaggaatggtccccaactttaggaaggggatggggcattagcaacaaagacagctagtcagattcatatagaagatatctcaagactgttccaaatacagaaaccaactagacagtagaaggagcacctcccaggggtcaaagtgctttgaaaatgtaaacctcccacatagctacatattcctccagaaaaaaagacataactgtttccaacagaatgagctatgagacagatctaaggatccacttccctcctggggacttagtagatctaaactaaaagactgagcggaagcttggtcatctctctgaatctaaggagtaacaacagaataatctactggatgtcaccaaacagtaccagacacagaaagtccttcagaacctcacattgaacccatttccaggcccacgtaaaaaagctacccatgggaagtacagaacagagccatgagcttggagcaggctgccatttctacttttagccctctaagagcaggcaagttttcttacatagccaagcgatggtgacttgcaaaggtttctgtgtacatttcagaaaacaaaagtaagaacactttacatattacctggcataccccaggctgcccaagcagcttatgtctcaatttgcttttggtattttgcttgcttttgtggtgttaaggatcaaaccgtgggccttgtggataaaaaccaagtgttcttcatagcagtatatttctttcatatcagtgcttgcaatatagaggccagatttggatgccaagtagcttcgtcaatctctaccatattttttcagacaggggcttttgctgagtccacagctcaccactaactggcataccagtaaactctacatatccatccacctgcctctggacccccagctttggtcaccatgcccatcttctatgtaagatcctcggttcttatgtttgcacaagggcaagtactttatttactgagccacctccccagctgctgaatttgtttccttagtgcatattgttaaaaataaaaaggggcgggggtgagaagacaagagactagctgtcagatgagctggtatgtcactatctgtattccctccatcctccaattcttgttttgccaaaagcaagcagaaaaaattaaagacacatcttaaagtcaggttcagagggcagagtacagaggactctgagggagctctgttcatggctcatacatgccctttattccaagctggctgccagaagcatgggctcctcacaggcaatagaaaaatccattatgagtttttgatatccagctagtacagagaccccaaaaggctacaattcaaaagatgtaagcaataaatatccccataggacacggagtcacaagaaatgtggtcaggagcaggagaagctgaattaaatgtgcatccagggaaaagtgagaaagaaatgcttacttaaatctttcccagagtgatttagaggtcaatgtcagacattaggactcagggctctcccagacaaacaaagcacttatttaaatagaaattagtgattgattgggttagaaggcaattatgggcagtcatatggcagatcttgcctttgctgctataaaccactttactgaacatgggcagcatacacttgtcacatcctgagcatgaagaagtatgccagcttctacagagctgactttgtaaactcacacctagaccctgtgacacacaatactgatgttagatgactgcttgctgctttgagaatagtgcctctggagcctatgggaaccaggccactgtgaggacctctggcagtaaggaaaatacactttggtaaaacagtgggcagaaaacacagaacaatctaaaggtttacctcctactgtggtctttaatagtacaaagtgaatcatccccccacccctaaacgcttctggaagttgtgctagtgggacacagaaagacttcctggctcagagggttcatatccacctcaggcttcataggagccacgtaagcattcttgacctggtacagctcagacaggaccaggctcctaaggcctatcaaagcttcaggtttgggggactaaaagatgtatagactttgttcattctacagatgacaaactgagcttagggcactgaatgtgtctcagcacattcagtgagacagggctggaatacaatccctaatagcatatgttagatatgaaatacacgcaatggcccatgtgctaaaggctgtgacctccagctggcagaagagggtagaacctttagaacttagagcctaatagactaaagttaggtaatctggtacatggtcttaaagttggactgttgagactacggcctttcaaagtctgttgcttttgatttccagctgccatgaggcaaacagttattccacgtggcattcatactgtaatgtgacacatgaacagacaagaagcaacaggctaactgaccttttcattattataaggtagttgacttagatattgtattgtaaaagctaagaaacaggagcatcaaatgctgcaagccctgacccatacatacactgacaagcccaggagaaacacagacccaacagcaaagccctggaaaaatacccaagagaaaagatactgacagctgagtatcagatcctgtaacatcctcaaccaacatttctagaactttcttcaatggactctttacaaagtatcgtccctgaggctggagagatgcctcagtatgtgcttaagagatcctgctgctcttgcaaagatttattcccagcaccacatcaagccactcaaaaaccacctacaactctagctccaaggaacctgacacctttttcttgtctctgcagatactggcttgcatagaatgcacatgcatacactcagatatacactaatgtataaaagaataatctcttgtatatcatctcatgtatttgttcttggctttggcagtttggatgaaaatggccccactggctcataggcactgtcactattgggaggggtggccttgttggagtagatgtggcattgttggaggcagtgattcacaagggggcaggctttgagatctaaaatgttcatgctatgtctagtgcaacactctcttcctgcagaaccagatgtggacctctcagctacatctccagcatcatgtctgcctgtgtgccatcatgcttcccaccatgtgaataacggactaaatctctgaactgtaagtgagcccaaattaaatgctttccttcagaagagttctcttgggtttcttcacaaaaataaaaccctagccgggcagtggtggtgcacttctttaatcctagcacttgagaggcagaagcaggcagattttagttcgaggccagcttggtctacagagtgagttccaggacagccagggctacagagagaaaccctgtctcgaaaagcaaacaaacaaataaacaaaaaaacaaacaaaaaacaaaaaaaccctaagacactgactctttgaaagaccttccgactaaaataagcatcaagcagactggggtttcacaccaaacttggtttatggtcatttgtaaaatatgcaagatacagtgagaagatggaaattaccatcctgagtgatctataaaggacacacaaatcaatctatgaatgaaagacaaatatactatctgtattatgcttataacagaattctggctttaaatgaatggaaatcttgttacacagtaccatatggatgaatctacgggacattatactaagtgaaagcagccaattaccaaaggacacatattaactgacctcactcttatgatatacttccagtagttatatcacagaggaaggtagttgccagaggctgaagaaaggggaaaatgtttaatgggcatagcttttcaattttgcaagatcaaaagagttcttgaaattgagtgcacagcagtgtgaattacttaacacttcttaattgcacaattaaaaatggttaagatggcatattctttattacatataaattttagaaaacattttaaaccaaaaaaattatgactagcctcagcgggcggggggaggggggagggcataggggtctttggggatagcatttgaaatgtaaatgaagaaaacatctaataaaaatgaaaaaaattattatgataatgtatatgactcagataaatgtctgcttctctgtctccactttcaggacaagaaataagggtgaggacagggctgagaaacatctcagtggtaaagatcactgagtgctcttgcagttaacctgggtttggttcccagcatccatgtggcagcccctaatcatccacaacttcagttcctgtggatcagacttcttctggcctccactggtaccaagtgtacacgtggtagacattatgcagataaaacatgtcaaaacacttaaaaggaataaataagagagtactaagggtttgttttgctgggacccagagacatgcagctcctatgacataaatctgtaagtcactaaccctggagttccaatgtcctcatgctaaaccagctggcaaccaaaagccacttaacttctctggtattcactgtcctgagctgttcagtggacagcagagccacaaacttcagagggaatagtattctcaagatagctgtgtgagaaggagctcactgctctgacaacactatatcaactcactgctggctccatcagctggaaaggttcctccactgggacaagtggccccataagctgtatccgcccccagctctcacgggtctgctgcatattatccatgggcacagcccacacctacacacattctgcaaggaatctggggtgtgagggccatgcttccaggcgttctctggagacttcatctcagaagctgaagatgaggcttcctagcctcccaagagtatctctgcagcagcagtgaccttcctgtctcatctcctcccacaatactcattcccctctgcacagtgaagaaagatcaagagccacagccccctcttggtactactgtcacttaaatctgcaaagagagaacagctgactatatcacttttatagcctagcacagctactacctgggccaagaatgccaaccttctccatcatccaagctgccaaaagggatcacgacctgcaactttgcaaactcctattctcctagtcccaccctaaacacacacacagcctacaatttacctgcaaatgcacaaggaatcagctataatgaatgagagcatactgccacagaagaaatctaatctgggtctggatcagctgcgcaacctcagacctttcacctatagaaggtgcagctgccgtagacatctcttttacctcaggcttgaggtcggtcgttctcagatcctcctccacagcacctgtcctggcacctacgttcttgcacccgccaataaatgttttagctgctaaaacccttaagccaggtcctccctaattgaaaaggtaatgagaagagtaatcatgcctataaataacacagaagagatcttagtgaaaccatttccatgtagtcaagtcctctgactcccatgagttcattctgagtggaggaggtaaagggccacacacaacgagacaatatcactggaaggccatagcagagaatgtgtaacatcgtacaaaacaaaggaagactctcctcactatacctaggagcatgctgggaagatgcatgccatctctgaggaaacagcctctgacctcatcaagaacaacccacagagcattccccagggaagggggtttacaatatctcctgagcagtcgcctgagacagttctgtccttgagcaatagaagtttacgttttcttcttctttttccagtattgaaatgtgtatcccccctccacagctatatcatgcttcttcttgacacagtaactgccaccacagctatgggagatgaagctggataccaggaaggtcagagtcaagcaagaggccaaatttcagctcaaattcacattttcagtggtcgcatggtattatgcctgcacttcttgttacaaaacagaagctctttttcattaatatggtaagtctgctaatgaataaaggcctgcacgaggtcaaaattagcagaagtaagcacacttaagatgttactgatgagtaatgacccttttatagcacatctgcattggaagccccatgtatttagtgtttaccatatgacattatacaaagcatttcctaggaatcttttttaatccttattataccacaagtgtgtgtgtgtgtgtgttgaagactaaatccaggattttatgcatactaggcaagcaccctccaccgagctccaaacctaacccttgattttgttttagtgtttcttttgttgtttgtttgctatgtaacctagggtggccttgaatccatcctcctcctgcctattcctctcattctgagattaaaagtgaacatcaccatcatctcattactattgttagcttataatagacaaatgtgaaacacatcagtcagtgtgcttgcccaagtaagggagtaggtagccccccatacacacttttttttttttatttcaagagtgacgtactgctcgaagctttccatagcacacagtggcacagaacaagatcaagttattagagatcaaatctcactcacccagcacaaagctgcttgatcttaagctgaacacctatatcagtctcccccctgctcttttctaaagtaagtttaacataactcattgggttaactaagacaataagatacatgttgcagagtaagctatgttgccttctttcagtgcctgctgatctcactcaccagtacttgcttccaaacagcactctgatcatgactggatatatcacctcttctaaaagacttgagtccagtcaagtttaagaaataagtagctggtgtagagagagagagagagagacagagacagagacagagagagagagagagagagagagagagagggagagagagagagagaggagaaggagaagagaaggaggaggagaggaaggtgaaggtgaaggtgaaggtgaaggggaaggggaaggggaaggggaaggggaaggggaaggggaaggggaaggggaaggggaaggggaaggggaaggggaaggggaagggagaaggagaaggagaaggagaaggagaaggagaaggagaaggagaaggagaaggagaaggaggagaaggagaaggagaaggagaaggaaagaaagaaagaaagaaagaaagaaagaaagaaagaaagaaagaaagaaagaaagaaagaagcagcagcagctttcaaaaggttgaaaatcacgggtcctgaatttgaagatatcaaaagcactctagggttctaaggtacgaattctctgccatgctcatacctgacagcagcttggctcaaagacaaagtaaatatgtgacctccaattgtcagtccaacaagaggaatgtctcaacgtctccaggtgatggtggggtgtgtgcataagtaatgggcattgttcagcttcagcttcagcaagcgctgcaggttcccctgattctcacactgcctggctactgtctgtaagactaacagatgcagagagaagagagctgagatcacagaaagatagggaactcttcagatcactgatgacccttccagccttgtttcaagctccttgcatgtgaaacagttcccttctagctcagcatacttaactctaatgctacaatgtctacaacaaagccaaggtccaaggaggacttggagggctctattctcaggagagatacaataaagattccatgaacacaatgaaatagcccatgcaagataccaatacaagcaagaggggaaataggaaagtaaacactgactggctgcttgttgctattgaaagctgcatgggtatgataatgttggctttaaagtctagaaaaatccaaaactccccttgctgtttcagaaatgcatacctatgtgtgcctcagggaaagactgggaactccctgagaatacggaccatgcctttacattacggtagctttcatgccatacacagattagatactcaaatactatatacatggatgtgtgggtaccaggtaagtggatggataggcaagtggatgacgtgggcagatgggtgggtgagtgggtagatggatagatggggggaaaaaaggatactcaaactgcctttgaaagctaaatgactgccttgagttagcaggaggaattaacatcaggatttaactagtcaatcaaagtctagagcttttccccagagcctcttgcctacatcaccccatacttactcgcagaatctaaagtattccctatcctacagtctccgagccagaaagtcttatctaaatttcagctgtgcttacctggggctcatcctttgggcccatctctctagttctccaaccaagtatctctcttgattactttcacccaattctgctcctaacatgaattcctggccctacctcatgtcacttcatggcttccaaattagcctgtttactgcatagctatcaccagcacacaacacactggagacaagtctgtatcctaaagtactactgacctctggtgtagactgcagtgggaaccacctccatgcaggagtattgtgtctctgctttctactctgtaaccaggtctgcaatgaaactgactcacatttaaatccatctcagtaaaggaactggggatatcatcaaactcatgagatgcaagagtctcttctacccgatgagactgcagctcaacagaggttgaccttctcttcttcccaccctaaccttaaaataattttaaccatcacaaaaataaataaataaataaataaataaatctcattttgtttaatttgtctggagacatgacagaacatcctgtgaagattgttggttttttttttgtttttgttttttcaaagtgacactgacataacttcacctcatggtaataagtgtctttaatctaaatgagtcatttggtggggacagtgagtttgcaaaactgcacatgacttgacccctgcaggaagataagggggaggggagaaagaggtattctgttggtagctgacaaatacttagagcaacgagatcttggtttttgcagcaatgattcattgtagtgcatatggaaaacagagggaaacgagctgattaaaaattctgaggtcagttctccacgagcaagaacctagtcacagcacttccttactgtaagatataagataggttatcaatagggtaaacaagacagcctggccttggttaattcacccagggttttgaggtttaaagcattcaacacatgtctctaggtcaatgcagaacttggcacatagtaagcattcagtatcagcagttattaatatttagaaagagccttgtagagattggtgacttttgaaatttaatttaaatgaaatttaaaacttagcacaagcttccttgcaaagatatactaactatccatgggctggtggctcctatagcagagagcacatagacagagcctttccagcacacaaatgttctgctaggaaacactgttccagaaataaagaagtggcctgaattagagacttgtgtgacttatgtctcaattttctcatctgtgaaaaaagaataattgtaaccaaattattcaatgctattgagtattatctgctgtgtaagtgttgagaccagcttataataacagtaaacatgcactagatggtagcctagaataagaacacatggaaaagtacaagaaggataaacaaaatgattatgaaaaagtactttccatggggtcaagtacacagcttgcagttggctcattttgcattatatattaagaacatcaagaatgtactaggtactctgctggataacagaaagagagatgtgaacaagagctctgtcctcatgaacttacagtcagaataaagatgctgctcttgcttatgcaaccatatcagcaacacacaaattctagtacccactaatgcccccagcaatggcaagtgaagataagaaggaatgctacctatgagagagtgcataacaaaaggtcactatcatggacaggtagatggttgaacagatggacagaggaacagacagccagacacatgggagtaggctcccaaatactaaagcagtgacctggactctggatggattcgggtccaagtatcccctggaaagtggatagggctaaattggggacctgttaccaaccaacactaataaatgatcataaagcagtcagcaaataatacacatataaagtttcatcattgaatgcagaaatcttacaatcttaatgactggaatatatatggccttcacatacatgccctctggcttctattctgggctctgctctgactcaccctgtcagctagggctgctccctaagcagcagaacaaactccctatactggccctaaacacacagatatattccacagcccagtatgcccaactcaggtcccaggctctcgtatggcttgagcagcatagtctaggaattaggaagaactttgccaggaagcaagtatgccaaccacttttcttccttccaaaatctaaagttcatggatctataaggaccttttagctacaccacaacatggtagatggcacccttttaaaacaaatgtgaggtggaaaccagaggagttcaagggccaggcttgttgttagacaataaccaactctcaagagaccttacttgctctgcatgagactcacattaatcctttctgaagaagcaccccaagtgcatagcacttaggtccacacataggtccactcctgtaggttacctcacactgaagagaaagtttctagagcataaacccttgggaatcacaaacaaatgatatccaaatcacagtaagcccaagaatttggtagaaattagtacacttttgatgcatgctgagacaaaagaacaataaacagacttcaagttctcagtgctggaagaaactgcagtcatctggtctacctggactttactaaccttcaatcattgagccccaacccaatcttcactaccctctttgcagtctcttgcataccacttttctatttttaccacaactatattactcctcatcctactttaggagcacaatatatatggaaatacagtacaagaatcaaccacctctgtcatgcataaaatctagcttctaaataattacacaagacagtcactcattatgggtttaagtgtctggagaagaccaacttgtagtctaaggaactgaccaaggaacccatgtttaccaaaataaataaccaaggatgaagatgctaaatatcaatgctaaatatcatgcttcaagtaacacaaaattagatgacatctgaagttctttctctgtccgaaaatctacagggttcttgctagactgaaaagacagggttatttcctaagtgacctgaatccatttccttacacatcttccctcatctcactgcacccaacatcctccaagtcgtgggctccccttgcagaaagccttcatagactgcctttattagaatcacaggctatttctctcatatatcaagtcttcccatttaaaaaagaaaatgtatattttagctacctcatacccttagatgggtaaaacagaaatcaacaagtttgtcaaattccttgcactatgtattttatgtatgtctactggatagcattgctcagtacttacatgacattgaccctggctgactctcaaaggcatacaaatgatttttgggtcttcaaggcatatgagtcaacctcagaattatgaggtcttcaaggcatatgagtcaacctcacagaccatgatcagggctgtgaaaaaatgccaggaattcaggaccagaataaggattccagagatagagacatgtgatgaaatatcatgaactggctccaaaattagcaaaacttagacaagacatattaaaggggaaagcaacccctccttttggatcagggcttatctctctagctatctcctcagatatctttctttgtagttcagattagtctagaactcactgtgtagcccaggctggcctgcaactcacagcaattctcctgcctcatcctgccaagttctgagattaggcatgtacattcatgcttagcaggagctgaccttttttgatccactaaagatcaaaaaagtgttctccatagttccagtggtccctgagcaaatctatgcttgatctaatccctcagcaagcttatgttcctgattccctgggcactggcccaaaatagcactttctgggttggtattaagtatggcagagctaaaattagggctgtttccacacttctctggagcaaatcatcccaagtggaatgaaagtcatgtttccattctgactgcaaagtaaccctggaatttgggaaacccaaaccaactcatgtatacaatgcttttcagagccttcctgacaccttgggccccgatctgtgcaagcaactaccatgatcatttgcccatgaagagacacaaaacatcagacaagtaaggcaaggaaagatgtaacaacctgacccacagctagactcacatgtgccacaagcacctcaggattcctgggtcatgttagagaaagggaatgttctttccgctttatgccagaaacaggaagaccaaggagcccactcacctgcaagccatcacatcatccaaagctaagagtagacatgttcagaaaaacatctccccccaccccctagccaaaggtgaggatgaagtgacatcagtttatccagcgatggttgctactgcctccttctgagctctgtgctcagactttcagcacccaaggtaagagttcagatgtgtatccccaaagtagttgttacggtgccaaccatcagcactccagaatgtcaccttatttggggacagggtactgaaaatataattcaggtgaggtatactgagatagggtagacccttggctcacatggctggtggtctaagaaaacagcggggacagaggaaagcatgaggataaataaggttgagtggaagtcagggatgcttccactagccaatgagcaccaaggacagcattaagacaccggaggccaggaagacaaaaggaaggaccctgacaactcactgggcttcagacttccagcctcttaactggtgagacagtaaatgtccatgggtctgagccaccccttttgtagcactattaagtccagtcctaggagactcacagtccttgttacaatgtcatgtgacacatctgggttttccatgaggaaactgagtcttcattaacagaaataacaccagcagacaataccaattgtaatcctgaatgctttatacatttactcaacaacctcccgagtctggggcatgttagaggaaagtgttatgcaggtcatacatggtaaaatctgaattaaaattcagacccacaatctatgttcctactcagctataactgcctaaatcaagaaacaagtgactgaggaagacttactctctctagcagttggctttcaaaccttttgcctctttatccattctgtatttattccatttcccaacagaatactctgcactgggtaaccccacaaaataattgtggttatacaaacaactgaatcaaactgcagtggcttctttacatcccataatttcagccccagtccatataacaacagatattagaaaaagtacttgggcaaaagcatcttatctcccaggatgtttttctgtatcttgcattcccttgacatttacagtacatctacgatgtgccagccctacgatgtgtcaggaaaagtacacaagtgacagtccctggtcactctggaaagacacagaaagggacacagaactgaaaagtcaggaccaatgtgcaggtacagcacaggtaagtggggaaggcttcagagcagggtatggaaacctcaactttcgtttgcaacttttccaacactgccaataatacagtatggcatggcatacccatacagcatcatctcccccacttcttctctctctgctccttttttctaaaacaagcttttatttgctgaacgaagcatacttgtggggtagataaactgaacttcaggcttttgctttatttttggctctataatgaaggacatggaattagctgatcacctttaaaaatagttaagagctagggaattcatagacagcgggaaatggttactggttttgtgtcagctaaactcctcaggaaccagcaaatccactctaattccagatcaacaaatacgaagcaaaagcacaggagaagatggggaagatctagaaggcaaagtataaaatcagatagccgttatcttttcctacacaaaaatctgtcttgaccatcatgacagttatatggcagagcagaaataagcaacacacccttagacttgaccctgactccagtagtgacctcattaagtgggcatttgagccgtacagtctcttcgaacatgtgagcagaaagagggcttagtgccttgcccagcacaaggcagacatgtgatctatgctatccttggttattattcaccaagtctccacctaagagttcaacatagtgctggggaaaataaaaggcagctgccctacccctttggcactatcatggccaccacctcaaactgcatcacttatgttcttgaacctgaattcccccgtgaaagcaccctagatattcagtaaggactagatgttaagcagagagcatccaaagtcctcacccagctcccgctggaaactggaagaggagccagagcagagtgaaggaggcagggtcaagagctgactgacctaactaagaaaacaagcctcttccatgaaagccaaactgttttaacaaaactggcccactcacctctgccccagctgctcagggaagcatgaaggcccttaaggaaagggaattggccacctttcacagccaagaggacaagatactagcagaaagaatctacactgctggagcgctgctgctggcttcatgtttagtgttattattcctaccctgtccacaaaaagcacttggatcagcccgagtacttctttttttaactcctccagcactccatggaggcacgcctagataagtgagcatgagctcttcctggacaaaagagtcacatggtagggcttatttgtgttgacttttctcaacagtgtcaaagggaacactaggctggaaaggcactaacagatgcatatctacctggggacctggctgagaagctagcatgtagaaggtagtaatatctgggtctcagctagggaacctcacccacacaaagccccagggagtggcaaggaaagcatggtgataagtacatgaggtggaggtggctgtgtctatagtcaggatgcagaatgacatgtaaacaaatgctcagctcacttcctaccctttaatcagttcaggatgccaactggagaatgcctctgcctgcactcaggatgggtctttgcaatgcaattaagctaatcatagtaatccctcacaggcatgctcagatgtttatgtcctaggtgattcaaaattccactgggttgaccatcaatattaactgcaatagggagtcttcttgatagaaacatgccctttagctgagaaatcttggggaaaccccaaatggttctgccaccatacacaggaaagcctaaagtcaagttcctcttggctcaaatcctagctcagcttcctactgctgtggcagtatggaggaggaacttagccgcatgtacctcaatctctctgtctagaaaccatgaataataaagcaccttctgctctggaatgttccggaatctacagtcttgcagttttatgaatgtttaatgtacatcaaaccctcaataggctattgtaagtgcttctttactctgagcagtgaacacaaactgaacatgttcaaactgtagttagtgatccccattctgctcaggatcagagaagttgagaatcttatccaaactcacacagctaagcagagcatccaggactcaattcctctgctgttcaagaaaaacaaaaaaaacaaaaacaaaacaaaaaaaaaaaaaccgggaagtttctactaggatgctgataccatgccctgaggccagcacaggataagctgtgcattctgtaactgggatcatagcaataaactatactggcttcatttatgagaatccctgcttccagaaaggagatcttatttggtatttggggagttaagttctagtcccaggggcatggagccttctgtaatacctgagcttctttctgcccactcccacccccattactctgatgaaagaagaggaagctgatcccagctctatgaggacctgcaatctctgggccaaagaggccggaaagatttccatcccaaaattgttgtcaaagcactctgtggcctgggataaaatgcagaatatcagccaacacctgtccttgactggggaactatgggaagagagggacgcaccacagagagcaaagctcctcagcctgaatacatgttacctcaaccatccaaagggactctggagttgagggaggatgccctctgagtgactgggactgatgtattgaaagtccaaagccacacagcagcactcggtctcagtcatcctgcagcaggtaggggaccaggaacttgagggggcacagagtagtacacagcactttgggttgctttaactgaagacattccttgccagtaccccagagcatttggcatcagcaaacagaagaaaatagcctgccatgaagaatcctcttccctcctgctctgaagcctcctgtggcccctactgaagctgaggtctgctggaaactctggcatgtgaggtgtggccatcagttctgggccaggaatctgcctgtccctgatttacagatgcaatagttggttcctcatggctataaggtggcctctcccagacattgttcaacccgaatgtcttggaattgcaaacacatgcaataaaagagaatatctacaatagtgaggaacaaacacaagcttaaagtaccgctctcattcttcaacccagacctaacaagctctttgattcttgtttctcatcttagccacagacatgggaactaggtgattaatcctggagtaatcaaaaatgcaaagcacaaataattgtacccatatcggtttccatggtacctccaagcattggaattgatgagcagtatgggatactgaggaccatctacataaatcaggatgaacacccccgggggggccacaggagcagtggtggaggccagagctgtctgcggttgtggtaatgttctactgattggccttcgagttgaccacacaagagcatgcctttgggaaagtccaccacgctacacacttcctaaccttgattataattgcctgaaaatgatttcaattggctgagaaatgcctctgggattagtgaaacacacctctagctgtgtctgtgtgggggctctcatccaatgttggcatccactgatggaatcgaagtctacaaagactgccaagaggtggtggaaatgtcagtggtagggcctggcaggaagaagtaggttactgaagagtggagtgctcctgaaggggaacactgcccttggtctcttcctactcttctacccgtttcctagctgccatgcggtgctcagctttcaggggccatgcccttcctccatggtgctttgtcagagattgaaagcaacagagccatctcccagtggaccaagatctctgaaactctgaactaaaatacatcctttcagctttaaactgattctctcagatgcctatcaccactacaaaagccagccatagctacatgaagagactcagattaaacaaacaaacaaacaaacaagcaagcaatcaaaacaaaagtccactacagatatcaatacatccaatatctttctttctcacccaaggatatatccatgaggccaccatccaatggtacctgtacacttctcaaaggtacccaaattttggaactccaagtatcttcactcactctacaaagacattctaagcaccagatctgtgccaggctcagatctagaaatgaacataaatcaagaaagctatttcatttatagagtttattttttactttatgatcccaaacacagaggaatagggactgcataagaagctctgttttgtgtgacaggtatctaaaaggtggagctgcagtaaaattaaaacttttaagaattctgccaagagactatgggaaaggtcaaccaataataggcccaacttgagaagcatcccatgggcaagcactaatccctgaagctattaatgatactttgttatctttgcaaccaagagttcagcatggttgtcctctgagaggttccacccagcagctgactcacacagatgcagacacctagagccaaacagtggatggagcttggaaacttttacagaagattaggaggaaggattgcagcccctaagggggatggataacaaaggagaacgccagaacctgaacccagatgctaagtgaaatacttttcaacactcagtaataaccccacaagcaggaccaacagactcaattaacttggacccttggggctctcagagactgaaccaccaaccaaataacacacactccagctgaacctaggcctcccactcatttgtagcagatgtgcagcttggtcttcttgtgggtcctgagcaactggagcaaaggctatcccaaaagctctttcctgtatgtgggatatgttcttctatctgggctgccttgtctggcctcagtgggagaggatccacctagactcacagaaacttgatgtgccagagtaggaggatacccaggggaggccccacctgctcagaggagaagggaatggggggggggggatgggggaaagactgtgtgggaggggtgactgggagaggggcagtgagcaggatgtaaagcgaataagtaaaattaattaattgcttaataatagaaagaatgctgccacaaacctttaatcccagcacttgagaggcagaggcaggtgaaactctgagcttgagccagcctagtctacagagtgagttccaggacagccaggcctaaacaaagaaaccctgtctaaaaaaaaaattgctacaaggattcgcctactgcagataagaccgtgggcattcccactccaagcaccagaacacaaactacccagttcgtgccaaatggaggctccaagtcttttcccaagattttatttttctccaagtttttttttgttttttggttttttttaaggtaatcagcaaggctcttgacaattagatcattcgggctcaaacctccaactgtatggctctgggcaagtttctccacctccctgtatctcattttcaaaatggaagaatagttattagtagggttcaggaaacattaaacaattaatatttctggtacttaatacactctaactagtactgctttctcaatttctatgaattcctagtgtgctgcctctcttggtggactcccatgaagtctgccccaagcttcatgctccccgcaaatccaatgacacaaagcattcatggtagtaccaatggtcactcaacactctcaagaagaaaagcagaagagaaacaggtggtgctatgatttgaatatgaaacatctctcacaagtttaagtgtttgatcacctagtatccagcctgggatgccatgtcattcggaagtggatcactatggcgtggtccttgaggattgctggccagctctgcatccagcctgagcactcttcttcaccacaagccacactacaggctcgtgccaccatgggtgaagacctaacaccatggctccccatcttcagtagatgtaccccttaaactgtgagccaaaatgaactcgcctaattgttctaattccttctggggaatttcctcatagcgatgagagcaggctggaaagatggggagcaaggaggaaaacactccatttccaagagaatcacttcatctttgccttggttcctatcaaccacactgttcaacactgtagttgggagtaactgactgcaaagcataataattatccttttaaactattcctttctcctaagtatttgggtgtttgtttgtgtttttttttttcactttcaataatgatatgtcagaggctatctggcagaaatgcaatgatatttcttgatatagaaaacgaaacgttccaggtgccttcctatgtaccaggtttgcaaaagcacagccgtgaaagcctggcaccagaaaacgagcatggcacagaagacgagctgcatggcttactgtccagcttaatgagcaaactgtttcaagcctacagtgggctctgtggccctaaggtcttatgctgagcagtcaggtaaaatctgttccagctctgaatgagcaggtggaaaactcaaaggaatgatgaacatctgtccagaagaacatctgtctaaacctcagcatccatgagttgagaaacagaaggtcaaagaattcgattcataacaaagcttatcatatgtgattatatattgatcctttcaaaagacatggggaggagcctggttacaaaacactgagtcttagtttatgaaaatacatttcaattccaagt

SEQ ID NO: 63 - DNA, 8818 bp, Rattus norvegicus
gaattccgtctcccctgcctgtctttctgtcttagttttcctcctccctcccctccttgcttggcatacaagacacagtacagccagtcttctgcttttgctgataagcctacctcagacccccccctttaagccacaatccacaaaactgtctacttggttcagcaccctctgctgtcaatgtcagccactctctaggaagggagacctgttggtcagaataattcagggaccctacgaagtgaggacagcaggatacacaataaataacctactttgttctaggacctcatcctccgcagactttcccgatcctggtccattttcccacacttaaaccaccaacactcactctccaggtaaccagttcttggcttttataacgcaatgccattaaagtgttctgcctagcaacgatgaatgcaactcttccctccttgattggttaacagcctgaagatggttccaatctcagtgaggctgcataattatctatacttagtgatttttttttttcagctctgtggaagacagctccattctaaaggaggtgtatcagtctcttattgtcccttggtcccctccagaatgggtgctgggagggccccctgggtggtggctctgctagtgaacctcatgaggccagattccttcatggttgaaggcagagactccccaggtaagaacagaggggttcgtttctgggtgcattttctgggatttgcatggggctaactccccccacccccactccctgtggctcaaagtctcagactagagtgactctgactctaaagagtcccctcattgaccaggaagctctcatgtcctcctcagcacccacgatggctgcctgggaaggtcttcctgtacctgagacatagatgccgggtaggggaggaagtaaggagacattttcccctgctgggttccttatgcatcaacatcagacactagaaccctgagagctggagtcagagagcagcagagcctcttatactcttgttggggctgtcaggtgactggcagtaacacctcccgtcaacttttaaactcctggttagcgttcagcatcctactgaggagttttgaggtgtaagggaagttaaggactcagacaagttgagtattttaatgatctctggccttgggttgccggggagatgggctatgcagacaccagcgttgttagaccatgaaaatgcagggttgtgagcagaaaacaggatgtgatatgtaagaaaagacttgcctcactaaatacagaagaggaaccaggctggggaggggcgtcatttttctctgttaacaaaaaacgctctgagtttatcatgtccgtttgagaaatggggggaaaatcagcatagggttttaaatgatggtgaaaaccccacatgcactttcttcaccttgtaaagagggggtagacacgttgagggactggaggctggcacctcatctgaactctggccctcagaggggcctggatgaccatggaagtcattcttagcgggaggccaagcattcctggaggccgagtttaggaatgagcagacccgcagctcaggcacaaagccattatcctccaagtctcagcatagccgcttcacggaggtctgcccgctctgtcattctcaggcgcacagaactgagtcacagaacgccaccgttcaagaactctttctcctcctgtcccacctcctttcccttccttcctctccatgaccagcattccaagtgtgtcttcgacacgagtgtagtgttcagaaacataaaatgggctgcaagacggctcagtggttaaagccacttgctgtccaacctgaaaacctgagtttaattcctgggaccccacatgctggattaggggtgggagggaataacaggggagggggaggggagagggacagggaggatggggatgtggagaagggaggacacagggacttcggggagataggcactttcgggagatagggacagggatgagggaaatggaaggggggcagacaggatggggagacagggtgggaggggtgggggaaaagtggttagggacaggggtggggaaaaagtggaggtggggagatgatatggggattgggttgtggtgttgggggataggacaaaaagggacaaacttactcctgacaactgctgacaactgtcttccctgttcacattttaaacaaatgcaaataagtcttgaatgacactctatgactctttttttaaaaatttattttatttatgaaaatacactgtagcttcacatacacagcagaagagggcatcagatctcattacagatggttgtgagccaccatgtggttgctaggatttgaactcaggacctctggaagagtaaccagtgcccttaaccactaagccatctctccagcccatgattttgtctctttaatgttgtgcttttgagcacgttgcagtctgactttgtgcaccaggggcaggctttcccagaggtgcagctggttcctaatccttttatggtttccagaggattttgtgattcaggcgaaggcggagtgttacttcaccaacggtacagaaaaggtccgcttcctggtcaggttcatcttcaacctggaggagtacttacatttcgacagtgacctggggttgttcgtggcactgacggagctgggggaggtggacgctgatcagtggaacaaacgcctggatctcctggagacaagtagagctgctgtgaacatggtctgcaggcaagagtacaagctgggggcccccttcaccgtggagagaaatggtgggtgaaggggaggtctaggggttctctggaagaacctcatactaggcatttaagaggtcttaactatcctctgtctgtctgtctgtctgtctgtctgtctattacttatttgtgtgtgttccgtgcatgccacagtgcacacatggaggtcagaggacaattcgaggagttggttctctccttccatcacgaggatcctagagattgaactcaggtcatcaggcttgggggcgtctgtgactatgctgtgtcctcagctgtgaattgttggcttagatttttaaaacctgctttaataagggtttgaaaacacttcaacctcccttctacccaccacccatcacaggtattgggaagaaagttaatagaaacagggttatgacctgcctaaattattctttgggggatccgatgccctcttctggtgtgtctgaagacaggtacaatgtactcatatacaaaataaataaataaatctttaaaaagaagtagttctttgggagctcttccagccttcgcagtccggttctctagcaaacaccaacacgaatcagccgcagcagtctagtccacttggcaatcaccactcatggatcggcagtggcggtttgatccagaagaaaccgcaaggctctgccaattggccggagtgtgtggaaataggaagaagctgccggggtatcatgagaagttctttggcaagtcactctctatggagtcatggcaggcaaagatacaagcaaaccaacacaagagtgtcctcagggaggcagagcaaggcgaactaatgccacaaccacccccccactgtctgtgggccatatttatattcttcccctgcaaaatcacgctttctctctctcgtctgcttctgcaaaacaacctctcacctgtgtcagcttcagcacaacatcctctgacacagccgagattccaaagaaaccagaaatttccacctcagtgaatggtggtctccttctagaaacctcagagttcttggggtctttgagaaatagtgtccattgaatacagtgggtgactgggtggagggggtgacctggcagagtgtgaatcctccttgtgtgttgggagcagtgcagtaaaacaaagatggtgccgacatccagtcccgtctggtggtaaacaacttatctcgcatgtgcaggcttgtccctttgccagggtggccgcaggctaatggggtgattcgtgctctgccaatccctgaaggacaagtagcacgaccacagcctgttgtgtatataaggcgagcgcctttgctgctcgaggtacctgtatcagcaaagaggtggtcctgcaataaagggctgttgagaagaatcggactgtgttgcgtcttccttgctggccaaggtgggcgcgacacttgtggggcctcttctgcttctcagtctaggggcttggggaccccacacttccagcttctatttggctggtttgagatacagatcagggcggtcagggtctctagggacgctcctgtccctgctgtgctttctgtttcttctcttgctagtgcctccggaggtgacggtgtacccagagaggaccccattgctgcagcagcacaacctgttgctttgctctgtgacagaattttaccctggggacataagtgtcaggtggttccggaatgggcaggaggagaggtccgggttcatgtccactggccttgttaggaatggagactggaccttccagacgacggtaatgctggaaatgatcccagagcttggagacgtctacagttgccttgtggagcaccccggcctcctgagacctgtttctgtggcatggggtgagcatccttttgttttctgtatttctcagccttggcctatatgggctgccacttctgtgttcatttcatgttgatgacaagacacattcccctgatataataatcctagtaccagggcaggagaaaacaggacagacatccatcctccgaatgcctgggggacagagaaggagggctgttaacccacagcttgcctctaagcctgggacctagtattctttaacattttaatctttagggacattgtcacgggctgtaaatcagggagagacctggagaagtgtcttagctggtgaacggcttgccacataagtatgaggacctgagattggtccccaaagtcgatataaaaaatccaggtgctctggtccctgcttgcagttctagggcctggggatgtgtgtgtgtggagacagggagcctattagcatgctctaggtcagccagggacattgaactatatagcaagaatagcgaagatggcaccagaggaataacactggaagttgaccccttgtctatcgcatgcacgtgaacgcacgtgcacacacacacacacacacacacgacacactcatacacatacataacatagacatttacacccttacatgcattcatgcacagagagagagagagagagagagagagagagagagaagggagagagagagaagggagagagagagaagggagagagagaagggagagagagagaagggagagagagagagaagggagagagacagagaagggagagagacagagagagaagggagagagacatagagagaagggagagagagagaagggagagagagagaagggagagagagagaagggagagagagagaagggagagagagagagaagggagagggagaagaagggggaagaggagggggagggggagagggagagggaatatcagtgaccaatagaaagcgactccatttctagatttagttcttccctgagcagtactgggctttggggctttaagaagttgcggccagaactggaagcatcacattgactttaagtctcgttttctcacagtggctcagtctgaatattcctgggaaaagatactgagtggcgctgcagcattcctgcttgggctgactgtcttcctggtgggagctgtcatccacctcaaggctcagaaaggtagcagacctctgaagagagccttcccacctgccctgggcttctccacttccagcttcctttactgaggatctgagggagggaggctgtgctcaggtatcccccgtgacagggtttcctaaagccaggaggaagcagacaagtgctgagcctgagggctcccccaggaaaaccacatttgatgctgactgggcatctcattctctctttccagcgtccgtggagactcagcctggcaatgaggtaagcactctggttcttgtctttggctggcggatcacggccttgttcttagccagagcaagcatcatggcgtaggggaggcagaggtgcctctggctgggtgattgtcttctgagtgtctggagttggagaagcctcctgagatcctctcactcttcctgcaggcttcaagggcgcttctcccacctcacccctactaagatcctaatggaagcttctcccccagagcctgaagaagtgtgaaaaggctggggacccgggttgggtaaagaatgctggccgaagggtctgtgagatgtggtcatggatcttccccttctgctctgcacctcagtaccccctcattttcaggatgtggtccagaaacttccttaggacctaacccgttccagacctaagttgctttggtctctgtggctcaaccctaaccctgtgactgggatacccccggcctctctgtctcccaaccccagcttctagtcttccatacagttgccttaaaatccttatcataaaataaaacagtcacaggtaaccacagtgaatgtataattcaatgacttattcaaggcaaaacccatgttatcacctgctcaggttaaaaaaaaaaatcagggcagaaggagacccattcagagcctgcccacatgtggcccataacatatacagccacccaattagaacaagatggatgaagcaaagaagtgcaggccaacaggagccggatgtagatctctcctgagagacacagccagaatacagcaaatacagaggcgaatgccagcagcaaaccactgaactgagaataggacccccgttgaaggaatcagagaaagaactggaaagctcgaaggggctcgagaccccatatgtacaacaatgtcaagcaaccagagtttctagggactaagccacaacctaacgactatacatggactgaccctggactctgacctcataggtagcaatgaatatcctagtaagaacaccagtggaaggggaagccctgggtcctgctaagactgaacccccagtgaactagactgttggggggagggcggtaatggggggaagatggggagggaaacacccatatagaaggggagggggaggggttagggggatgttggcccgaaaaccgggaaagggaataacactccaaaatgttaataagaaatactcaagtttaataaaaaaaaaaatcagacagtggtggtctctgttgaaataattcatggcgcctcagccagtaaaacacccacagcaacacactgtccatgtgggtaattggatggcttcttccgtcaaacacaccttcctgtatacaataatccttggtctttcttgtctcccagactttcagatgtttgacctcatcctttctttctgtcaggattaaagcagttgagaagcctcagtctccaaggtgaagagattatgttgcccgcacacactcggtgccatctgacccactcttttgccctttgtgttttccgtgagttagcacctgatgaggatgtgaaggtgggactctggtttggttcttttggagtctcgaggaggtcatgaccttttctggagtcacactgtatctccttgtttctcttttcatggtgttacaacaagcattgatgctaattgcccgggtctgctaatttcctgggagttgctaacattgtgacagtccatctctacgattccttgtttatttatccatgctgttggctctgctcactgttacctgcactaaatttcaaagtcgatgatggtaaaaatgtcatcttgcagcgattccagcctgcagggtgtcactgttgtatcctctgctgcagggttctaaaacaaagcactaatttcatgtaatagcgaccttagcggagcaataagttcacgggttttgctaagtcttgacacctgagctacgtctttttactaatttgacaggattgggattgtttctgtcctatgcagatgggaaggctgtcgaaaaattgtttgagctgtgagggaagcttagcagcctccttcaatatggcgtcactttgtcttggtagaaagtattttttattaatctttttattgtttgagaattttgtacatctgtatcatgtgttttgatcaaatccacccccattctctttcttctcacttctcttctcccctgaccacatttacctcccgacttcatatgcgttttgctttaattcactgagtcaatgtagttctgcctggataacatgggggctggtccatcagccggagagtaggtggcctctcaggagccacatccttgaagaacatggagtttcactctgcagccgccgtcaactgcttgccaatagctcttcagctaagggcgacacttcgcaaatccctcccacccatgctgggattttggaatgcttgatcttggactttatattctaaatggcttttagcttgttttgaaataaattacagtttagttggtgggagaattttctggtgtattttcattgtttgaaaggatattagtttgtcttaaatggtctcaacttttgttctctgatgtcaataaagaacatcaactgtttgaagtagataaagccggatccactctgttgcttcttttttttttctctctctctttttttttccccagagctggggaccgaacccagggcattgcgcttgcctagcaagcactgagctaaatccccaacccctgttgcttctttttaatgtaaaattgtttttattgttttttctgaggatagcatgctggtgcatctcctgtgctccggcagggatcc

SEQ ID NO: 64 - DNA, 16299 bp, Rattus norvegicus
  misc_feature (1)..(16299): where n may be a or g or c or t/u, unknown, or other
attcaattgatatagtcccgttgaagacacactttattcaacctctcaaaagtccaagacaataaagtctcaaaccaaaagaaatatgccaagtctcatataagcatgggcttggtagaatattattagagtctacagcagaaacttttcataaatggactaaactttccaagcgttaggttgactgaatggatttttttaatgaaattcaactgtatgctatctacaaaaaaaatctcacaagaaggtgctaagggatggaaagaaacccactgattccaggaaagcaaaacaagcaccagagagagcccttggcatcccaaggcatggactgcccgtgagactggcctacctagaaggagaagagcagcagtgcctagatgctttctagtctgaattagcaaccagccaccatccatttggcatggacaattcagaagaaactatgtaggtgctgggtctgctgtggaaactcaaggacctcacaagagcaacaaataaagccacagacataagctatgcagcttgggaaagagccagtgtgtgaggacccccatatcacacaagactttaacaagagatatttatttttatatgacaaccttgtttgatttttaataattaaatgtttcaagaaaagataaaaagattaatggatgaatatttaaggaaattatgattattctgcttaacttatatgtgcagtacccaggtgttgaaatatcacactgtatcctataagtgtatacgccaaatacaatgaaaaagggaaataaaagccaaacaagtcaatgttcttgactagcacaaagagaggaaaatgggtgcaggtctggctattagccactgtcggctggaaaaaaaaaaatcatgtctctgattcccaaggtaaatcattcctgccaactgaactttgagatcaagattggtctgcctcacctttctccctcccacaggtaggcgggcaatccttacaggatttaggcaagaggcagaaaggatctgtgagagtgagggcagctactgaggagtggctgcaccatgagcgtctctgcactgagctccacccgcttcacgggcagcatctctggcttcctccaagtggcctccgtgcttggtctgcttctgctgctggtcaaagcagtccagttctacctgcaaaggcaatggctactcaaggctttccagcagttcccatcacctcccttccactggttctttgggcacaaggtatgaaggaaagggaaggatgggtgggaaagcagggaagatgggtgtctcagagactggtnatcgaaatcacaggacaaagcctgatgtataaaaattccaagtacctcatgagatacccagctcaggctgaggcacaccatccaacgatagggttattcaaccagtctggctgttgctcaactctgtactgatagccccacactttgaaagctttagttggtcttacctagtctcctcctcttctggctgagtacctttaatatctctgctgttctcaaacaacttttaagtagttccttacctagtgagttacctaccgctattctctcccaagctcagggcttgccagggaatgnatcagtgagttgaaaatcttgcccctgtgggttcttggtagagcagtagtgcacatcttagaagataccaggcacaggaagggttcacattgctgggatcagtgggtggctgccccagactaggagtattttcaggattggtgaaggtccaaattgaaatcccaaagtcatggcacattaaaggaaaaggctggggagggtcctcagatgacagcactaatgttagaattcccacagggtcatttagctctcccttctccttcccacacaccctgcactgtaagctacttagattgaatttatttccttgtaccacagagttcagctcaagagccaggaacagattataaaattccctagaaagggatagcagcctgtaggctaggaaggctgtaggccactgacccattgcactgtcaccccagggaataatgtacagagccaatgaggctacatagaaaggcgttcaacaaaggattgtgcaatagatgctcttagaaagacctgggtatgcagtgttttgtgtgcagatctgagaatctgaccctgtggctcctctgaggaacacagctccaaccaccaggactctcgaatctccctcaggatcagccctcgtacagcaaagctatgagtaatagcacagataattcatcgaactgcctcaccctcctgacagcttcggaaaaatccaaaactatgttcctgtgtttggtctcctcttgtctccagtccaaaaaataatcaagagtcccactaccttctttttccctcaacagcagtttcaaggtgacaaagaactacagcaaattatgacatgtgtggagaatttcccaagtgcctttcctcgatggttctggggaagcaaagcctacttaattgtctatgaccctgactacatgaaggtgattctcgggcgatcaggtgagcgtgacacgctgttgtgaagacataagcacattcctccttggtacttgccctaggctgtcaaattccagaagagcgtgaccctccacactctaccattcttccagactacaacccagcacagggccaacaatactcagaactgaaaagtcaaatctcttagcctaatgtctttgtctttctttattatttattcaaattaagatggtaagtctagttaattgtttcaggtttgaaatctctaattgttacctgcctgactcatagaataacgaagccaccacaaacacaccaacacacacacacacacacacacacacacacacacacacacacacacacaccacttgttccattctttgactttgatctcatggactgtttctcaccagctcagcatctcagccatggaggagtccagctactagaacacgaatcctaaccttcctaagcctgaatgttaggacagagtttgaagggaatatgagaaattgggcagtgagttcagacagtttgccaacagacagcacttaaaacatcatagaaactcgtgcctttaaccacagttgccttggggctgccttttaatcccttttcttgttaagtcattgtttccctttcagatccaaaggccaatggcgtctacagattgctagctccttggatcggtatgtatgtctaagttgggaatgtggtctacttctaattggattttccgagtgctgtgcctctggttcacagagaataaatgtgacagactgccactatcatggtctacccccaaatctctacttctgacccttcacttctccaaacagtcctatctgaacatcagtgtgatctgcctccttctaactctttccgagttttatctcacagctctcataatcacagcatgtatgccagtgccgctagctgggaaattcacgttctggactgtagcattcttcagaattatctctaacacttcatagttccctgtccccaatttatttagtggtctctctgatttgatcacacatatacacacacctctctcctgcccaggatatggtttgctcttgctgaatggacaaccgtggttccagcaccggcgaatgctaaccccagccttccactatgacattctgaaaccctatgtaaaaaacatggctgactccattcgactgatgctagtgagttcatttaactttattctcctctattcccctcagctgtgctgttctttctacatcagctgcagctttggctactactactgccacagataccatagctgctgtggctgcggctgcttcttcttcttcttcttcttcttcttcttcttcttcttcttcttcttcttcttcttcttcttcttcttcttcatcgtcttcatctccttttttcttcttccttctctgcttatagtctcctctctcctcaatctctctcttcacctactcagtgtatgcatcaacaagctttacatatgtattctactttgaatacaggttcttcacatatagttaaaatagaaatattccaggtactaggatatggccatacttgcttattacccaaggcaaagagcatcagagcatcttctccttcttcaaatcttcaactttagagagacttcccaggatgacacttagttggggtttcccttgggtcttagtgcttctgcatggacttgagtcagagagatggactccagatccacattgtcagagccaaaccttccataccaccacctttcaacaggcctctgggttatgactgttttagttcattggagctagcttatagttcagaggttggtccattgccatcatagtggaaattatggtagaacacagacatatatggtgtgctagggaggtagctaagaattctatatcctgatgcaaaggcagcaggaagagagtgagacactagtgtgccttgagcatctgagttctcaaagccctaccccaatgaccacttcctccaacaagactacccctactctaacaaggccacacctcctaatggacctatgagggccgttttcattcaaaccaccaaccacattcctctccctgacccccataagcttgtagccatatcttaatgcagaaatacaatcagttcaacttcaaaagtcctcatagtctaccacagcactgttcaaaagttcaaagttcaaagtctaagagactcatgcaatctcttaactttaatcctctataaaatcaaaataaaaaaaacagattacatactcctgacatgtacgggatataccttacaatcccaaaatggagaaaaggcagcatggtgaagaaatactgaaccaaagcaagactggaaaaacgttggcaaactccaaactctgcatctcaatgtcttatgtcaaagtgctcttctgatttccaactcctttcagctttgttggctggttccactccctgttagcagctttgctcagcaaacaacccacggcatctccaacactgtaggcttccaaggcaattgtggcttcatcttcaagcttcacacagtaacctctttaagcctctatgcaagaacacccatcacacgtgcctggcttcagcagttttccttagacaaggagggcaatcccataatccattccttctttccttgactctaaaccagaaccatgtggccaaagctgccaagttctcatactcattcaattacatcttcaccagctggttttgatggtttcctttactgcctaagcttggctgtcctaaaactcaatctgtgtaacaggccagccttaaactttaagatccacaaacctctgcctcctgagcacttggatcaaaggtgtgcaccaccaggcctggccctgggcttttctttaattccttttcacttttctttaatttcttttccaaaattggaagtttatctgggtgggatcttggtctgaggtcaccgctccctttattccacttagcatcaagcttttctctaatctgtttatctccttcaacacaggccttagctacagtctacttcctggtgcctcctttctcctcaaagtatgcatttttgtattttttctctttctcagtttgctccttttcactgtagatttgcatgagcgaatactaataaccatacaacaaaatccatactaggcaattgtaagatatcctctgccaatgcagctaatccaactcttcaccttagccttaggcaaaccttttgaacaagggcaaaagcagccacattctttgccaaaatatcataagatatctacgccacatactaaaatttttctcctctgtaacctcttgagccaggaccccacaattcaaattaccctcagccccaccgtccttcaactactacagcccattaagccccacttaaatcattcaaatgcttttataatccaaagttccaaagtccacattactccaaacaaagcatggctaggtctatcgcagcaataccccattgctggtaccaacttctgtcttaattagggtctcattgctgtgaagagacactataaccacacaaccaattataaaggacaacatttcatggaagccagcttacagtttaaaggtttagtccattatcatgatgggaagcatggtagcacaaaggcatacatgatgctagagaggtagctgcgagttctacgtcatatccaaaggcagcaggaagagagtgaaacactgggtcaagcttgagcatctgagacctcaaagcctgccccgcagtaacgactttctccaacaaggtcacacctaatccaacaagtccacacctcctaatagtgctgcttcctagaggcctataggggctattttcattcatccacaataatgagtcaattgttctcagcaagcttttgatgaatacactggggacccccattagaaatgccttcgtggctacttgggtgtttttatactctatatgtagaagtcctaccattatctcaggttgagctgagctctccaatcactgatgtatcatctttttaatctcctaaaaacagaattgcttatcaggtaaaacatgttaactaactgcaaacatgtgaaacttgtttcctttcttatgagtttctatatttaattttgaagtaatttacaagaatataggtgtcctttcacaaagatttgttttgcagtctgtaaaacatctgttatcaaaattgagtaacttagaacatagtatcttacaatatagggaaacaattcagtctattgagcacatattttctagggaaattaagtcaatgttcccctcccactacaggacaaatgggaacagctggcaggtcaagactcctctatagaaatctttcaacatatctccttaatgaccctagacactgtcatgaagtgtgccttcagccacaatggcagtgttcaggtggatgggtgagtgacaacccttgatcttcagggcctttgatcttaccaactaatatggatttatctgtgatgcatgtgggacattttggatactcaataaagagtcttatcccagccccaagtcaatccctgacccaattgaatcctatcccaaccacagaccactgatccctagctgaggtggaatcctagacactcatgccaccttctaccaccttctaccttgaaaattacaagggttatgagacagagttatgtgcctcagtgttgtctcttcttatcatatagaaatctccccagagtccgtactatctgtgggttggagagctctacagtctaatctgttctacttcttcttcttcttcttcttcttcttcttcttcttcttcttcttcttcttcttcttcttcttcttcttcttcttcttcttcttcagaaattacaagagctatatccaggccattgggaacttgaatgacctctttcactcccgtgtgaggaacatctttcatcagaatgataccatctataatttttcttccaatggccacttgttcaaccgtgcttgtcaacttgcccatgatcacacaggttctgtttgtgccttctgtctccctcatttcctaagatcagctcaagggggctattgatgacttctgaggcagatccagacccttcagtgcatccccctataggacctgggtcacatccatgctagttacttttacactgacaatgttagcagttggaatgtcagaatgccaggtgttgaatgtatgtcatcatattggtaatgtgtagtgagacctgacccagcaactcaagcagagcttctattgcccatggtgctaagagagttctgacctgtgtcagatcacactggtcctctaaccctacccaatcctatatagcgcacccgcacatagcttcaggcaaggagacacatggagctacatggggttactgtagctctcaggtctttggaataattgatgttctggaatagatggtgtgatcaagctaaggaaggatcagctgcagaatgcgggagagctggaaaaggtcaagaagaaaagacgtttggattttctggacatcctcttacttgccagagtgagtatgtgcagcagaggcctgagagtctgcctgggaacacacaaggaacaagtatagttctgatgatgcctgttgtttccctcagatggagaatggggacagcttgtctgacaaggacctacgtgctgaggtggacacatttatgttcgagggtcatgacaccacagccagtggagtctcctggatcttctatgctctggccacacaccctgagcaccaacaaagatgcagagaggaagttcagagtgtcctgggggatgggtcctccattacctggtaagagttcaagtagaagtgcccttattctttgggtctccagtctacctgacctccacattggactttatttcagggatcacctggaccagattccctacaccaccatgtgtatcaaggaggccctgaggctttacccacctgttccaggcattgtcagagaactcagcacatctgtcaccttccctgatgggcgctctttacccaagggtatgaatttcccaggcctttcatcctagagagaatggatgctcagtagtctgtgtccttcaacagttctgaatccctctgagtgccgtttccttttcagtaaataaatgcttcttactcataaagtacagtaataagcttaaatgacctcctataaagttaaatgctactttgcatgaatgacattgaaagcattcttcatcagctaacattccttcttcttttgaatctatgatctcatcatgaagcatccattctaatttgggaacaatgatgttttccagactcaattccagatgccagcaccatataactcatagccacacttattcttcagatgtcctcactgtcacatatgttttcatgttggggctggaaacacaggcatatgtttgtacatagaagtgggaggcagaggtcagcattagttgtcattccacaggcactgtccaccatgatttttcagttcaggaggtcttgtactggactgtagctcatctcttaggctaggctggccactgagctaggaacctgcctgtccccacctcaccagcagtgggataacaagcatgtgccaccacacacagtcttttttatatggattgaggtctttctctcaatccccaatcttttatcatgttctacatttgatataatgtgtagacatttttataaaaaactactatttatatatagatcagtaaataaaatgtgacctcagattcttgccaaggcaagtaaccggttactctccataacctgatagtcagaccctattgctgaagacacaacttatgtcatcaaacacagagaaaatgatctggtgcccaactagatttagacctaattattaacccaaatagtgaatagggtctctttttcaagcttatttcactaatagttttacattatacatttatacatatatttatattatacaggcacagaacacacacacaagggtggggagagagagagagacagagacagaggcagagacagagagacagtgacaaagacagagagagagagacagagttttcaaaaataaaaagagcaaatcaggcaaatttaaacagaagaggaagagttttttcttgcagagctccttggaatcttcaatgtgtctatctagatgtctgtgaaggaaataaggaacagagtttcctcacgccctgatgattgacatcttgtctctagcgtacattggaagtggagccccacagttcttttctgctgaccttttgctgtggcttggtatttgtttcctgccaaactcatacagctatgtaatacccagagtcacacgttaatggggttgggagggtgaaagctttgtgaatttatgttaatcatggtggtgctctaaattgtactgaaggcctcctgtttgctaagcatgtgctctaggactgagccacttaccatccccaagatgagatggataaacttggcttgactacgtgctttagagcacctgggagtggatagattacattagggttggtctcacattattctatatagtggctttagaaagagaaggagggagactgctaagatatacacctgtcctcaccatgataggatgcaaccaagggagagagctgtttgaactttcagctccaaatctgagctaaataagcttcatatatacatatatatacatacatacatatatacagacatacatacatacatacatacatacatacatacatacatacatacatacatacatacactgggatgtacagggtagatagagaatcagacaggggctagaggaatgtgtttcttttatgagacaaagcaagtaaaaaagagcaatgaattccatgccgtgagtcatatgtggtccagtctctgagaaggcacttgggttagtgacagagatgaactgatcaccaaatacaagacccctgcaatgtcaggaaagcaccctttgtctcacagctcattatggcaaaactctagtattgccacatcctgctttggtgatatgtaacccctctctgaaattttagtaactcacctgaaaaaaaaaacagaataaatcaactcactctggggacttaatatcttaatatcttaacatctttagtggaaatccttcatcaaatttaagttctaactttatttattcccaaaaccggttcatcttttttgcttctctctctctaattccatttttttatacttctcacttgtgcctcaggtttgtttccaactcatgcacatgtgctgaaagtgatggtctatagcaccctaacctcttgtgcaaacgtatcattccctgctgtctcaggaaccaaggagtcacccctgggtgtaacccatcttctctcacatttctatctgccccacaggtatccaagtcacactctccatttatggtctccaccacaacccgaaggtgtggccaaacccagaggtaggaggttcccccaaggagggcagaggagttggtctcaagatcaataccacctattgtccccacctctaggcacattgtccattgtgagttgcaagcaagggtttgacctctatctatcctgactgaagtgctgtctccctgcaggtgtttgacccttccaggtttgcaccagactctccccgacacagccactcattcctgcccttctcaggaggagcgaggtgagatagcctgtgtatgatgattgatatactgtaaagatctttgcagcattccttggttttatctcatgcatatatggcatcttcgggtatatcctgattgggggtgggggggagaagcttcttgaggatgtgtctgtgcaccaaaggagggtggcatttcatgacacactgtgaagacattaacccattggccaaacaaatttctatgcagtgcatgcacttgcttgtgttctgatgtttccctcactttaagggcaggactttacattgatttttttcacatgactttaacttcaggtgtccagcttgtccaatttgggggctcttaaagggcatgtcttttccacacctctatctgacccatcactattcctgcgtagttctctattctagaatcactgtgcaaggaattaatttgcttgcatgtctgccacattcaactgtccagtgaagtattacatcatttgaggcaaggttcacaccagggtatgctaattccacctttgctctctctctcccaacacaattttcaatccgtgttgatgctcacatctctcttgcaattgcccaatggccaaagcttgacagataatgtatattcctcaagtgaggctatgtagtctaacttcagacaaaaggcattaaaaagaaggagagtaatctgctctgaagtaaacctctattttacatataacagcatttttaaggtttctgggagtgaaatagaagacactcttgaaatagctactgaactggacaaagactttcccatggcttctagggaaatccttccacgggacctaactcactgcaaactttaaaaggtggtgcagaagaaggattttctgagcctatttttcatgaattcatgaagtggcaaatcagttttcacagaacaggctagaagtaagttgttcttccagacacaggctatgtccacacacttggcaaacttcaggattgaatgcactcaccgcaaatcatgccactgccactagaagacaggagagtattgtcttaactcagtagtaactcagcttaactcaccgagccatgctgctggtggtgtttgctaagacagagtctcaggcttgtctggagctcatggtccctctacctctgcctcccaagtgttgggattcagacacagtcccccatggcttgctttggtcagaagctttttcatctttattatatttcgttctattttttttcatcccttaaatccacatgaattacattttaagaaccaaggaaaggtaactattttaactgcaaaataaattttaaacaactcctgtgtgtccggtgctatgctataaaaatatagaaataatgatactatcccattcctgcctctaagagttcaaaactgtggcccacaaagacaaatatatctgtgattaaaatatattcttcccccattctttcactcatccactcagcagtttgcagaatgttccatgttcctggcatcatcccacgccctgagggtggcatggccttgaatatggtatagatggtgccttgaggcctagaaggagcagggtcagtcatcgaagaaataagagccaatcactcattgacctgagcttaggggatatgaaggaaggggtggtcctcaaatacctcaacagcttgatcttaagtaggaagtgggatgggcaggaaagaggtgagggcagcagccagtagagggtataactgcagctagacctttgttgttttgttttgtttaattttatatttttatttattcactttacattctacngccttccttccagtcacccctcccacaattctcccccctttcccctcccctcttcccctcctctgagcagatggaggcctccagagtgccgccaccccccacccccccaacccccccaccctgtgtacttcaagtctctatgagactcggcacttcctctcccactgaggccagacaaggcagcccagttagaagaacacatctcacatacagacaacagaaaagctaaacaagaagaaaagcctaagtaaggaagctcaaatctcacttagaagaggaaataaaagtcataagaggcagatggagggagagaactgggaggaagagaaggagaggagggggtgggggtttaggatcaggtatggggaaggacaggagagatggccggatggccatgaaaattaatggaaatctgcaactgatgggggtgggggaagcatctccaggaggagacagagacctgggataagggaggagcccaaaaatcaatgggggtgaccttagctgtgactcactacactggagatatggaacctgaagaggcaactaggcattgaacacagccctacctggtggaggtatagaggatcagtgtggagggagggccagggagaccaaagaagcccaggaaaggaaactgaagaaggaatagtgtacatttctgaagtagagttggaaagctatagaggccgatggattaaggatgtggggtaccctaagtaggaggcagatggggcagacacttgaagatcctcaacacagtcttcctgtaggtcctcttctactgatacccaattccactctgtgaaagctatatgctagatcttcctgaatgaagtaaacgattaacttattaaatgattcacaagtttgacttctagtccttaaaatactgtcctaacagatttcatacgtctaaaacaagaaaaactaggatcaaggtggcattgaaaaatgttgaggctatgtcaaaaagtcaggagagccaagtaggcatgacccgtcatctcagccattaaactgaacctgtgacagtaggccctgagtgttgttctgggatccttcacgggtcagcccttaaaacaggtaagaagctaatgagttttattttccctttctgacccaggaactgcattgggaaacaatttgctatgagtgagatgaaggtgattgtggccctgaccctgctccgctttgagctactgccagatcccaccaaggtccccatccccttaccacgacttgtgctgaagtccaaaaatgggatctacctgtatctcaagaagctccactaattccggtaaggacaaggacagactctatgaacatgtggcctggcaccttgtcccctgtcatcccttcctgtcaccatcttgctttctgtctgttcatcctcacacctatttgctccctggcctcttggtctcctcctctctctctctctctctctctctctctctctctctctctctctctctctctctcctctagattccccatttgttttttggtctcctgctacccacatctgactgtgcacctgatcctgaacatccttcatcctccatccttctctccttgcctcttcacttcttaccatctttttcccctacaggacttcttcattataccaataatcaacggtcacaaccttgatggtcgggaataacaggacgttattatcttacagttgtggagctccgaaatctgaaatgagtttcactggcagaaagctgagttggtggtgtgactagccttcttcagaagagtgcttcagagagtcctctcctcctctcttcagtacagatcacccttctcagcactggaatattcctctgctttaaagccagcacccttcccataccccctcttctaaaagccttcccttttacaaatgttcttatgacatcatcaagaccactgaaaaactccaagataatttcccatctcaatattccttactccatctaacctactaagtcccttttgaattatgaggaataattcaatttgttccatgggctccaaaactcaaggcctgagcattattgtgaaacctttattcagcctaatatcatcttcacaagactgttacctggtacgttcatctaaatctcccctgcatagtctctctacctgactattcctcacacaagtttctttaccttccctcctttctccaataaagtgtccagtgtcctgcacagcatctgtcttctcatgctggctctgaacacaggttcccattctgtttgaaactgctcctggatcaggatccatgatgagttctctgccttccctgagatgccatgctctgctttctcacacacacacatacactcacacatacacacacaacacatacacacacactcacacacacacatacacacacactcacacacactcacacgtacacacacaacacatacacacacactcacacacacacatacacacacacactcacacacactcacacgtacacacacaacacatacacacacaacacatacacacacacacacacacacatgcacacatcagagttcttggatttattcaaatactcatgaagaactggtattaataatggtgtcttgattagaagacaccagagtcaggaagcttcagctcaagttccttctagattagtgttccgccggttccttcctttaatatttaaattcagtcacagcctcctcctatcagagagggggtacctccacccagtctacactacccgagtgccaaggtgctgaagaaacaaatgttacagtttagactcaggcaccacccagtgacgcatgatggttatgactggagaatcagcgcccacgtcataactgttgaaatcttgctacatctgttcagagaacagtttatctgtgtgctagggcaaaagggcaagttagttgcattaaggcttctagctaacaggcacactataatgggaccttaacatcccagcttcgagtgtacagggagggctttacaggagttagcaagtatcttagggcagagcttccaagctgtggacttcttccaagcagaaaagaattggtagtaggaaaggtatatggcacatttcccaagatgccctagagtggtggttctgaaccttcccaacgctttgaccttttaatacagttcctcatgttggggtgactcccccacccccacccccaaccataaaattaactcattactactttataagtgtaacttcgcaaagaacataatataaaatctgtgctttctggttattgttggtggctcctgtgaaagagtcattcaactaccaaaggggtcatgagccacaggtaaagccactgccctagtcccagggctagaattc

SEQ ID NO: 65 - DNA, 7518 bp, Rattus norvegicus
gtaagtgacgtgcacaaggggaaccaagaaatcatcaaggggaaggctgcggatccaagcgaggtcttatctcacacctagcctccttggatccttctcagggtgctgctgatggcctgaggaacaccaccctcaaaggatttaattttcctgaaaccagacagctagcagatgcttaattaaagatatagactttgtaaccctgagaaatgaaaatggcagggatcagcattgcccaggaggtatgaacaaagaaatgcagggcattttagaccagcattgtgacataagacacattgcatttgtccatatacataggatgcatgccatatagagtgaacgctgatatatccagatgatgatggtggtgatgatgatgatggtgatgatggtgatgtgtagagggccgcaataacatgcgcgaccattagatggcgctggcttccactgcgccccacgtggaaggccaagtcagtcaagatggcgccagccttccctgcgccagctggcccccctatcaggaagttaactatgcgcatgtgcaagagtgccttcctgccaggtctttgcccattccggggcgtgcctgatgagatcatgagtaaacaaccaatcaggcgttgatgcgtgcccgagggttaaataagcgcgcctggctggcgcgcggggcttctccatgagataggaataaagtatcactcatagcaagaatttctgtgtctcgcgtgcttcttgccggcggaaagtcacgcgcgggacatttagtgccgagatacccgggacaaaaacatcgccggcgctacgagaggcctccgtttcacggaagaaattcagaagctatggaatacaggtaaaaaactctgagagaccatggctagccttgatctgctccaactcagtcccctgccggacgcggcaggtgccgctgtggttgctctggcaaccctcgggctttttctattgacctttgagtttctagctaccgccaaacggcgtcagaggtcgcgtgggaactgcccagctgtaacagcaaagcggagagcgttgggggcagggagagacagtcagtcagaaacagaggatagtgaaaagttgcaacgaggaaaggatcctgatcgatctcaagcaccaggcccccctgcggtcttaccaccgccaggggtgaaaaattggggaaagaatgccccgggtgagaagggaggaggttaaaaggaacacagtattttgggagaaaaactttgtcttagtgcttatgaaaggtgtaattaagctcccgcgccggctctggggatgctgcggcatccgggtgctgacgcgacagctttacagaagtcatactgatcagatttgatagaggcagaccgcctgaaaatttattcaggagaaatcaaacaaaaggacatctcagtccccgtgcacagcctgatagagttaatgtaattgggttgtgagtaaaaatactccgggctgtgtttcacttccataccattggcgaatgtcggtcatactgttcagatatctctcagtttcttacagaattgggtttcaacacgttggtggactagtccaggaattgagacaatccatcgcccatatcagctccactcgatggatagtcgccgtgaacaccatctggcttttccccctctttgtctattgtttgtctctggtgcaccaggctgtccatgtctgtcagtttatgtctgtggtttttgtttctcgttgcttaaatgttttatgtttcgtggtcaaaggaaaaaaaaatggtaaaaaactttatctgctggtcgtgcacaccttgacttggttttaactcgtttcaaaaaggaacaaatgaataaaaaacagtttcaatcaggtttttgaagccctgtgcctagagccaggtgtctagattagctggagaagctgaccagaagctaagcgtctacacgagctgatcttaaaagcgccaacagcttcttcatacaagagttgatagctgtttctcttaaaaaaaaagaaaatccctgacttattacttgactcaacaggtgacaaggtgcttctcctaaaatcataacaaaagggtaaaaatggtgtttggtctaaatattaaagataggtgtagccatttcaattttgtttcttattggttttatatgtataaatatgctctacttgccttggttgtggactattggctttcaagttattagatatggttaaaagggtataatattggtaacagaaagttgacataaagctagtaatctggatggagtcattttagatagcgtgtgacatgggccaacctagggaaacaggtctaaattgaggtaatgtttttatggaattcttatgctagaaaccaggcttctaaaagaatttaggacattgtccctggttgaggtattggaggccacacctttgtgagtcccaaatgtaagaattgacagtcaaactttgtaacataatagatagacctgtggtgccttggagactagattgtttgttggaggttgagttttgctttccaaagctgtggcttgcccagaagttatctgtattttaatgctaattccactgccccaaaaacagctgcctaataagttttactttccaaagttgtggcttgcgcagaagttatctgtattttaatgttaatttccactgccgggagaacagctgcctagtcacgtactcagaattcaggtgaccttgtggctgtgttctggtgttacaaagaaggacttaaagattgtgatttaggattgccagtgttacattgactaactcaaacttatttttaattaaggaaaaatcaaacaggtagagattgttaacaggatttataaggattgatgaggttttagaacttgtgagagcattacagccagtttccttactacaactgccatttcaagacagatttagaggattgattttatacaatttgttttcgtcataacaattgtgagttttcatttcgtgagcttgcttatagtttcagagagcccataaagtgatatcattaagaatggttaacagcctcatgttaggtaattttgttgcttcttcagtgtaagaagttagaacttaaatctttctatgtaatatggaaatgtttactacaaacctttgctctcaaaatgagctttaatatttggagagtagctgttaccctactccaaaaaagaatatttgaagctaattttaagctttctaaagatatgttaattggctaagtacctcaccttaccagaggacttaggtctttgttatgcacattggagataaagcttcagctgtgttagtacagagttgtggactagagtcatggaagtattttaaatagaaacctggtaaaacatatcttattccaaacaacaattaattggttactactaaatactgatatttggcctatcacgtatacaaatttttcagacaaaattgataattttattctttacatgtttttgtatttcctgtatatttgtacgtacaacccataggaaatgcgcttactgtatttataggtggttcatctaatgaaaaggctacatgtatgattggatcacttgtttattctcttgagtttctgttgcttcaacacagattattagattacgtcctgtagccactgtttttaaatcaagctttctattcattactgatagccaatgtgttggcttgtggtttacaattgatttcaattacttaatgctttattagagacaggttttctacttgaaatcagtgagtgacgatttcaatgtaaattgtctgacaactcattgtcctttcagtgctctggctcagacaactaaacaaaaccatagaccctgctctttaaaaatggtaatagagttgataacacaccctcacgaaaagaggaagactccatttgtttactttcaactcccagcctcaccctgccagctcagagatttctagtaagactaaatctggacaatatttacaagatttgacatttctaattaatgcttatgtttaggtaaataaagtttgtgaggtgctaggaaaatggcttagtggttaagagcactatatactgctcctttataggacatttaaaaactcaaactggattttctgggctccttaacaagggaggacaagattccagacagattataggccttacataggaacaattagtcaaaaaatctcattctttatatattcaatacaattatgctagagacaataatttggtatacaagtcaatttataaatacaagtgctcagtgtcctcaacttaatcctcgaggacttaccttaataaataatatctttactatatctttataaattaaaaagggggagttatccctgtatgctaaataatgctccttttatttcaattttaaaatatttcaattttaaaaatttggatgccaaagtttatggcaccctacaactaggcatacctctgcctaggtgaaatagagagatccacttattgacatgttcctgtccagatattttatattggggaagagggaatgtttgtgttttttctacaggatgctacaggagtgtgccagctgcctgagtgtctggtgagacatgctgatcctgggagcatgaagattcagctctcgtggttcgggtccctggagtcattcctctgccctgagaggaagatagaagatttcccttcatcctttgtcatcacagagactttgccgttgctgcagtcagtgttaccgccacgtgttcccgtcccattgtggcctacgctcagactctgtacactgctgtttcctggagaagactgaactctagctgttacccctgtcctttcatttccctggtgacttttgctgccttaactggtaactggtgttgtcattttacagactatagcttcacagaaagctacctgtgtaaagctacagtgactggagacctctgtcctggttatacagatctcagaaatggttccattgtctgctggttgttcccagagaaaaatgactgatcctgaactgtcctggaaaagaccttgacattttcgctgctattgtagcagccattactgctgcagacattgtgtctgcagtgtctggagttatcctcccccaatctattgttagacaagtacagtgggtgaactttctggagtagttactaacaactggaaattctaaatttcattataggagtggcttgaccacggcccttggtggcaacagctgaggaggaccatatgaggtgcccactacttatcgggagtggctctgtctgatgcagccctatgctgtggatcagtgttcatactatggttggtttacaaactcagatctcaacagtaacatgacaaggccgttatcactcaagcacttgcagccatttgaacaaagggcctcacctggaatttggttatcttgttcaggatttactctgtatttgagttccctgctcctgcaccccatggacctgtgggtccattgcactgggaggagagggatactctctgtatctgagttctctgctcctgcaccccatggatctgtggatccattgcactgggattgagagagactcagtgatttcctttgatcagcccttgcacatcgctgaggtttcctcattgcacgcgatagggtgatcatttctgctataaaattataattataagggtgagatgtagagggccgcaataacatgcgcgaccattagatggcgctggcttccactgcggcccacgtggaaggccaagtcagtcaagatggcgccagcctttccctgcgccagctggcccccctatcaggaagttaactatgcgcatgtgcaagagtgccttcctgccaggtctttgcccattccggggcgtgcctgatgagatcatgagtaaacaaccaatcaggcgttgatgcstgcccgagggttaaataagcgcgcctggctggcgcgcggggcttctccatgagataggaataaagtatcactcatagcaagaatttctatgtctcgcgtgcttcttgccggcggaaagtcacgcgcgggacagtgatggtggtggtggtggtgatgatggtggtggtgacaatggtgttaatgcccccaatcttgtctgtcacttggaacaagcaaatcacattaatgccaatgctaaacagcagaagctgagcagatgtgtgggaatgccctacgggtgtaggggaaatgcatgatttcattacaacttctgtatacagcggaaaactcttccacaaaataaatgtcctagttacctctctattgccatgataagacagcatgagcaaggccacatacagagaagaaagaggttatttggaggtcatggttcagaggatgagtcaatggccatcatggtgggggggtgtggatagtgctggggcagtagctgagaaatcacatcttcagacataaccatgaggtagacataggaggggacatagtaggtagatacacagatagatgattgttagatggatagatagatgtgataaataaatgatagagagataatagatacataaataggtatatagatacaaagataaacaatagatagatacatagataaacaatagatagatacatagatagataatagacagacagacagagcccacctgagtggcacacctcttccaataaggccacacctcctaatagttccgccaactggccactaaacattaacatatatgagcctttgggggccactctcatccaaacaaccataagaaaattgttttttcttaaaactaatggtgaggagctggagtgatcgctcggccattaagagagcatactacgtgtcttagaccttctattgctgtggtgagacaccatgaccaaaggcgacttgaggggaaaaggacttctgtcctttccttgtcacagtccctcactgaaggaactcagagcatgaacccagaggcagaaactgaagcagaagccatgagcagaggctgctgactgacttggtcctcatgctttctcaaataccccagaaccacccctcagggatggtcccacccacaatggcctgggccctctctgagcaatcattagttcagaaaacacactagagatctgtatgcaaatcttacggagacgtcttctcagataaaattcccctttctcaaatgattctgtcctgtgtcaggttgacataaagccagccagcacacggctcttgcaaaggatcagagttcagttcccatcactcatgtgggtggctcataactggctatcgctatagcttcggcccctgctggcctccatggtctcctgctctcacaggcccacacagagacgtttctctctgaatggggcatcaagctgaaactgagcgtcaatagatgcacgatttccagccccaggaagggcaggatatggagacatgtactagtttctgacccctgatggactggagtcatgtctgtggacatgaactaataggaccctctgggagggcgtgggacttcctgcggggaagtgagtcactgcagcccccacctctctgtcttccag

SEQ ID NO: 66 - DNA, 2161 bp, Rattus norvegicus
  misc_feature (1)..(2161): where n may be a or g or c or t/u, unknown, or other
attatcgaatgctgagatgcatctaagaaatgttcaacatcctttgtcatcaggaaaattaaaataaaaatgacaacaccacttcacaccagtcagaatggctgagatcaaaatctcaggtgacagcagatgctggtgaggatgtggagaaagaggaacactcctccattgttggtgggatgcagactggtacaaccactctggaaatcagtctggcagtttcttagaaaattggacatagtactacccgaggatccagctatacctctcctgggcatgtacccaaaagatgctccaacatataacaggacacatgctccactatgtgcatagcagccttatttataatagcaagaagctggaaaaaactcagatgtccctcaacagaggaatggatacagaaaatgcagtacatctacacaatggagtactactcagctattaaaaacaatgacttcatgaaattctcttttctttcttttttttttttttcaaagctggggaccgaacccagggccttgtgcttgctaggcaagtgctctaccactgagctaaatccccaaccccatgaaattcttaggaaatggatggaacttgaaaatatcatcgtgagtgaggtaacccaatcaccaaataacacacatgatatgcactcactgataagtagatattagaccaaaagctgggattacccaagatacaatccacagaccacatgaagctcaagaaggatgaccaaaatagggatgcttcagtccttcttagaagggagaacaaaaatattcatgggaggaaacacagagacaaagtttggagcagagactgaagggaaggccgcccagagactgccccacctggggatccatcccatatacacccaccaaacccagacaatattgctgatgccaagaagtgcatgctgacgggagcctgatacagctgtcacctgagaggctcagccagagcctgacaaatacaggggcagatgctggcagccaaccattgaactgagatcggggtccccaatggaggagttagagaaaggactgaaggagctgaaggggtttgcaaccccataggaagaacaacaatatcaaccaaccagagcccccctccccatctcccagggactaaaccaccttcccaagagtacacagggatggacctatggctccatccacatacggagcagaggagggtcttgtccctcatcaatgggaggagaggtaaatcccagtgagtcatcagtttcctcttattataccagatggtaggaatagtgttaaagattaccagagtcgtggcaaaatgccaacaaagccagtttgaagaggctgtcactgtctccacctcctctgntgggactacaagctacgatccaccatacgtattaatgtggtctaggagtagaagcccacggttctagcgtgctaggcaagcaagcataaagccatctccatttcatctccagtgccagggaggcaaagcggtcactttaaaaaactctctagtttgaagggtgcactgctttaaactccagtttcaactaaatattaccccacattgtctcatttgaaccctcttaaatttgaataaccaggtggggagactggtgaatcgaaagctacgtaccttcaaacgttggtccataaatagactctccgtcatcccctcgtccttctactatatctagagaaagacaacagccagatcagagtgcagggctgacaggagcagacgcctaaattgattcttgctcacatcttatatcaagtctagagttaaggttgcccagctggaaatactacaacttctcctcagcctgcaatcattctcatgtttatcaacaagttagaatggaaagcctttgaacaatattaagccatcgtatggccaaaatttaaagaggatgctcacagatccatttgcttgatctgtttttttttttccatgtttcactttgcttttcagagaactggaaagattaaactgagccaacaaaatggggagagctctttggagnnngtttttctcagtgtgacgatgctgcctgtctcggaccttgctttgtagagcaggctggncttgaactcacagtgatctgcctccnnagtgntggggttaaaggcaagcacccccatgcccagcaaatactgaattc

SEQ ID NO: 67 - DNA, 74868 bp, Mus musculus
aagcttcatctagggagataggccaggaggcataactggtaggacaaggaccatccattatttcactcctggacagatgcctctgtccaccaagtctgggttgctgacgcttcaaagcaaggaagaaaatgggcaggaagtagaggaaactgtaaatgtggctggagggagacacatgcacacatatatacacacagagagagcaggaggggcacgggaagaagtgggtgggggaagggagaggaagcggggagagaaaaaaggagagactaatgccctgtgactacccttctacttcagtcctcctcccttccctcctcctttccctcctccccagggtccttacctcctctttctcttttgcctctgctcagccttaagctaattggttccatttcctctactgaagctgcctttccaagcccaagaaaccccttaactcatacctaggatttgctctgaagagcttttggggaacaagtaaagaagggttcaggcctgactgagattaggccattgggattcatagccctttggggtcacatttacaaaaaactacacacctagcaggcatagtaataaacaaacttggccttcagggctcttaaaacaaacttccagacaaactcagtcataaaacaaacagaaaggaaacacacgccaatgaaacagaaagtccaaatataaagtcttagcagtaattacagagttgtaaagttcaaagtcctgaggagtgattaataagcaactccctgcccctcctcccatctcagaactgaacactgtctgcacaggctccacacacagccctcagcatacctcaatggtgaagggcaggaggccatttccttacacagactcattgcaataccgagccctaactatttctgaatataaagaaataaactgtgcaaacttacaaagaacatgagcttttatacaagaaagggccttaatgaacccgtagcctattaattcagctgaactggctgcctaacaaggcccagagatcctttggtctccatctccctcatgctagagttataggtatatgccacagcattcagggttgaactcagatctggtttaaatccccaggcccacttgtttcatgtttgagcattttcagtcatatactaaatggttggtttgggtatttggtcaacgtttggtatctgcaagggggccagtttaagttttattctagaggctagaaagatgactcagctgttaaaagcattggatgctcttccaggggactcgagtttggtttccagcattcgcatggtgacttagaacaattcataactccagttctaggggatctgatgtccttctctggcctccataggtattacccatacgcagtgcacagacacagacatacatgcaggcaagacacccagatacatgaaatacaattttattttaaagatttgttttaagcgaacaacttcaacatgtaaataaaatataaatcattgagtcctctttccctctttctttcttttctttttcttttattttctctttaagacagtgtctcactgaatattaatggttgaccttgaacttgctatgtagaccaactctacttggaactcacagagatccacctgcctctgcctcttcattgttgggtgtgaaggcatgcaacatcatggccagcaacaatttcattcctcttctgtctttctttctttctttctttctttctttctttctttctttctttctttcttttctctctctctctctctttctctctctctctttcttttctgtttctgtttctgtttctgtttctgtttttgtttttgtttttcgagacagggtttctctgtgtagcccgggctgccctggaactcactctgtagacaaggctggcctcgaactcatagatccgcctacctctgcctcccaagtgctggaattaaaggcatgtgccaccactgcccggcacaatttcattcttaaatccttcataagcttattttgctcatacttcaaacgttattaaagttttcttctacagtgagaactttggaacattgtcataccttgtagatatgaccaggtgttccatacagtgctggctttgggggcctggaaaggaatttaaagatctgggatgttctccaggccaagcccaagatattgcagaatgcctcacataccaagatcctgtcatacctgtgtcggcgtctgcttgatctcttccctccactccacccgcccaacatccaaactcctatgatggctggggacaatgtgggagtatgaaagttggccaaggtcctcaaatttcacctcttgtccctctttctctcctttgaacaccaaaaggacttttttttctacagtcagctctctactatttaaactttcccttacaggcaggaaaaacacagagaagctagattcaatagggaaattgtcagttttgagctaacatgttttgtctgatttttatttcacgtgaatattcttcaactccataagaacactttctacccttctatgcccatgctctgaaggttcttttgtgtatcctgatcaagagacatgcttgacatatgttgattttgagatcattctgacctaatagatagaggatgacaaatatccatatagctgtgtacagagacactttgcttctaatctctgcccagttttttctttttctctgcttagcagctctttcagtagttaaagtgtcccatgacatcatggttactatggtgtagttacagcttgaatgtgcttttcaaagattcttggtttagaaacttgatttccactatagtagagttagaactcatgggatctttaagagacagaacctcataggagatcattattgaccattccctgctctcaagtctcctagtttatcaagatctcacacacacacacacacacacacacacacacacattcttcatcagtttgatacatccaccatgaggtctccactcaaatctagctggtgcctgcagcacacccttggatctccagagctataagcaaattaaatctcttttctttattaaattacccagtctccagcattttgttagagtcacagaacatggacaaattaggtgatgactgttatatatggagtcagagtgattgtagatccagatcaagcaggaaaatagagcagagattgagccttgtgcaaagtttggaaaattagaatatgaaaaaaaatgaattgccaaacgtaatggctattgttggttgtcaacttgactacatctggacttaactaaaactcaaaaatgtagacatacttgcaagagatttttgtttactttgaaatgggaatgtaggcttagatttttcaaaacctaattttaataagggttctcaaatgcttcaacccccttcatagcccaccattcaaaggttggaggtaaaatatggtaaacagaacaaggggatgtggcctgtttagtattagttctttggggtgactccagtctctgtttgtcaggatacccgtagtccagttcagtagtgtcaggataccaaacacaaatcagcaacagtagcaagatccagctaaaaccaccaggcctctgccaaatgacaatagtccgcaggagccatcaggaccagtcagaatgccaattctctgccatgcctttctcaacaacaaagtgaagatcagcgaagactaagaccaacaaagcattgcaagactagctacacaagtgtgctgacactgtccattgagtcctgtttatactctctccaaacatcacgtgtccttccacaggtcttgcctcagcaaaacaccacatgagtctgtatcacatggcacatccagaaacttccacttcataggaagatctacttctgatctagatccacaggcagtaggaagggagagtcactggaactggcttgggcttttgaaaccccaaagtccatccacagtaacttatttcctccaacaaaagcacacctcctaagccctctcaaatagtgccactccctaatgaccaagcattcaaatatatgagcctatagggcccagtcatactcaaaccaccaccccagagaaaaaggctagaaactcccttctaaactaaaaggacaactaaaaatggttcgtgctattgatggagacaccgaggcactctagattgactggcaataacctgtggctcattatcgtataagatacagtgaatattgaaaatgctaatgagacaggtgacacatgaaatgttatgtagaattacgtggaacagatagggtgtgcttacaaaagcctgtgccatgccaatgagccccatggcacctcttgagtgatgtaaaaggtccaatcttttgtactacagcatgaaccattttttactctggtttgctcctacctccccgagaagtgtacaaccccctgataaactacctcagcttctgctgcaaccatgagtttctgctcaattctttgttcaggtacacagcctgaaagggacactgccccccatccccaccccaaggagtactctgaaccctgcctgatatcagctaatatcaataaaaaatgcatagtcacaactataaaagttgtctgctggggttaccctgctcaggaggtgatgtttgataatggagctaatccacccagtgcactgactggcgttcaataagtcctcacaaaaataagttgttaaaatttttttaaatccagtagactccccgtatctgccttattcccatttgttcataagccatcagtttaacagactcatttctagggaagaaaaaatggaaaccagactcttccagaaatgtgccaggagttaaaattaattcactattgagaggtcccgggtccatacaccccacccactcctccctttaacaagacagctcagctcagtggcccactctagcaggaccccctccctctaccactcccctggacttctagaagattcctaatgttgcttctgctttcgcagctgcacttcctctcaggaccctggaatttaattcatcagggcctagagacaggaatccaattgaagatgtcagaccctctccctacccctccacatttctgtcttcattcattcaatgaatgttcctgagttgctgaaccctgctggtgccctgttaagtgctagcaagacagagcacactatctaagcgtcttaaacagggttccctctgtgggtcagatgtttagtccttttgttctgagttctttcacttttgctcccttcttatcccctggtaacttcacaaggcttcctctgaatggcaggtctgtctttctcttgtccttcttgagctatgcaaatccttaactgccttgatgagctcagcactggccctgggcctctgctcctttgcggttctgttcctgtatgcagctcttctttagacagaattgactcctgtgcccagatgaaaaggcttctcagtgctaggcttcaaagtaaacactgagatagacctttgtaaggagtctatttgaagaggtgttaagaccacgaacagtcagacagcatggcagagttctgagccatgctagagtcagacagcatcctgaagaaacctcgggggaggcttgatctcttcttagaactctctgaggagggaatagcttcacagcacaagcctgcaggctctctagcttccttgtaggaaacatgaaagcaggtgggggcaggatgtgtagccaccaacaccttcttctgtaaactcatttccccaggggagaaaccctggcacctgggtagctgttagattcacagacaacattctcagtagggtgcctgctgatatctatgagaggggaggactgcggcaggctgctctggagtctagcatagcatttatgagccaccttctgacacccactctaaagaacattggtcagtataaggcagttttggctacagtaagaaatgcttagagcacccagacacagttgtttaatttttgatcagtgactcagcaaagtagaagagggattattgtcctatcctgtaccacaaggacatgtggctttcttagtcagtgcagtggctaaagaagccaccttctgatgagttcagcattttccctaggcctcatccccatgcacaagccattggtcagaatttgctgtgcccacaagtttggagaaggacaatgagggaatatgtgacgttcatgccataggatgagtcacagtcccacaaggaccctctcagttctgtaagtgtatagaacctctggaaccttccagctctattatcaagcctattctctctctctctctctctctctctctctctctctctctctctctctctctctgtgtgtgtgtgggggggggaggggggctgtaagtgtgcatatgcacatatccatgtgcatgtatgtgtgtacatgggtatgtggaggtcaaaggacttccactgtgcctcaagtttcctcaagaattctcaagtgccttacacttttgtttgagacaaggtgtctcgttggcctagaatttcaccaaatagactaggctagctaacagggatcttccagggatctgtctgtcttcacctctcatcttcccatagctgggattacaattgtgtgccacatgtctaccattttgtgtgggtcctaggaattgaactcagatcctcacacttgtgaggtaaacatttgactgacccttcctaatgtctatttctaaatctctcctcttccttccttccttccttccttccttccttccttccttccttccttccttccttccaagaggtgtttaaattggaggagggagggagatagataagaaggtcctgagcatgacaggagcaacctaaagacagattgactctagcccatagtttgagtgcacacaggccattatggaatggagggcatggcagagttcatagtggtaagagcatccagctgggacctctctgcttctgaccaggaagccaagaacaggaaatggtgcttaactagattccttttcattcagggttagaccccagcccatgaagtggtactgcccacactcaggccgttccataccattcagtcgtcccaccgcagttaatcctctctggaaacaatcttaaagtcaataaatctcctaggtgatttcaaatctagtcaaatagacaactaagtgtcatactatctccctctctgagatttgacttttcctaagttccagctacccctctgctcccaccaaccccccccccacacacacacacaccttctaggactctgtgaagtttttatacacctagctcaaaccaggtttctgtggctggggccaagagaataagccattctccaaggctttccctttttccatactactgtggatgaacttgtgcttttggttttagtttttcatttactttatttcttaatcatgctgaggacaaaactcagggtctcacatatgctagataagtgctctattaccaggctatgcctgcatccctatattacactaaaaacacaaaagtgacataaagctgtgtgtatctatattgtgatactaggactagaatgatttcatccatacatgttatggtgtactatgctcaggcaagcaagactaaggactcagtaaatatggtcagctctgcacactcatattcaccagctttggaaccatttggcacatgtcctcctaaagacaaacaactgaacatcccttacatgctatttccaaacatttgttcccggatggcgtgggaagatgagcccattccacagcttctggagctaggtgagtccaaggcaaggaggaaccttcttccaagaatctgacgaagtcagcatcatgaactctctcaaactttagcttctgctagatggacacagtgtttctggcttgcaatcccagtgctggaggggtgaggtgcagagataggaagatccttgggacttattgaccaatcagtctcaatgaatcagcaagacccacaccagtaagagacactaattggggaaatgggaaggggtacatgtactgctcttgaggagtaacacctgaggttgtctctctgtcttgcatggaataacacatcacacacacacacacacacacacacacacacacacacatacacacacacaccactggcagcttatatttgctacagaacccagtgtacctatctattaatcctatagaggaaacacaaaattgaggtttggttagacatgctcaaaatcaccagttactaaatgattcatccagaagttgaatctagatctgttagacacatctcttggtttgcagctgtgattctcaaactgaaactttcatacagtcatgtggagattcccaaggtacaggaaaactctgattcaacaactacagactccggatgggaactgcaagttcatatttttctttttatattttttacttacatgtatgtttgtgcaccctgtgcatgcctggtgcccacagagttgagaagacggcatcagatctcctggaagaggagttacaggagcttgtgagccacggaatgttctgggagccaaacttgagtcgtctagaaaggcaacaagtattcctgaccactgagccctcttttcagtcgctttctttttctcttttgagacagggcttcatgtagctcaggttgtcttcaacttactatgtagctaaagatgaccttgaacttatcttcctgcctggctctcctgactctcctgggattactcctggctgagtccatatttctttttctttttattatttaagtttaattgtttgtttgtgtctacatgtgagtgtttacatgtgcgtgcaggtctcagtaggagtccagaagacagcatagattcccccggagctggaattacacatagttgtgagccacacgatatcggtgctgggaactaaactaaggtcctctgcaagagcagtatgaactctcaaccatagagtcatctctccagagtcagaacccatatttctaataaactccctgtgaaagctacaatctctagacctacagcaggtgactttagatgacagcatagctttgatcatgtgagtcctctgagcattacgagggaactcagaaggaagcttgattttgtagaccttggaattagtagactctgagctaattttatatagctcctatggggtgggggtggggggcctcacagtaacatctgggctacataagtattcagctgtacagagcacagctttgttttttaagatacaaaaaaaaaaaaaaaaaaaaaaagacggcagactccttttttggtctgctggcagaagcttccctgagagagaagacatctttccctgcacccggttctttccagagttgctctgcactggccagtatgtcatttcaccccagacatgtgggggggggcaagccaccagccatcagccatcacctagctgtagcaggaactgtctgatctccctgcccctcccccatcacgagttttccaaaaggcaaaatgataataattacatgactttctgtgagaaatgtaactttgagaaatggattcacacagtagaacacgtcatcaacccagggaaaagtccaaattttcaggaaaacaattttttaaaaattctttttgcacatatttgagaaagggggcagggaggacacagaaacttggcctaggagtttgctcattgagtcaaggaaacctaaaatggctgttggcagtcctctgctggaacggggtgtggtcccctttctgacagctccaataaactgctcaacgatgaaagtgaccttgagctatgtctccaaagcaagagagactttctgcaactttttcctgatactaactgggagctcgtttctctcctatcaggagctgcagccgtcagctcatccaccaaaccccacttaaaacttagtttcccaaacccatgcccacattggcagtttcatgtaaaccatgaaagtatgtgcatgatctatgacccacaagtctaccctccagtgctaactcgagaggcatgcactggggacatgcactgtggacatgcatgcacaagggtgctcagggaagctctgttctcagtggtgccgaactgagagcaactggcttatctggtagtcagagaaaagtgaaaggggccgcatttatgctctggggtattatagagtgttgggaactgtagtggacttctccagttatgatgtaatcatcactgccttgactcagagcaagtgagatcactcagatcacaagactgagcctactatcttttcttcctagaaggttaaatctttcaactgagggtccagtcacagttcccttttgccactgtcaactacatataattctgtcctggctgcaggagttgttttgtttgcttgtgttcggggagggtgctatggaaggcaggaggttgtcgggggagtccagtgatgcagttttcccatgttatcatccatggtgggatgggtagtttttctgatgtagatatctttgagttacctatgtccctataagtgagctcagtgagttcattggttgtccatggagacatttcctgggtctgtaggtatcctatctgggatgaacaagaaaagccatgccttggggggggggggggagatggatggactcaaagatactcaacaaggtgggtgaattctacggtgtactacatgatggacaaatgtaatcaaagatgggtgggcaagatggcttagtggataaaggcaattgatatcaaaccttaaaaccttaagacctgaattcaatctcttgaaccatgtggtagaaagagagaaccaactcctgtaagctgtcctctgagttccatgagtgtgcacacacacatcaccaccaccaccatcaccaccaccaccaccaccaccaccaaatcaatgtaattaaaaatgtttaagtgaacacaagtgtcaggagtcaaatagttagatcttgggaagtggagaacattgggggaagggtgctggggttctggttatgttcagttccccaatctgagttctaatgatatgagtgtacactgtgtgaagaagcatccaggcgaatactcatgcttacagacctgttgtaagaaccaaaccttcggtcccatgcccaatacggtatgaactggacatgatggtgtaagtccataatcccagcactcactcaggagattgagacaagtagaccagaacatcgaagtcatcttcagctacatactgagttctgggtagtctgagctaatgagactccatctctaattaattaaaaataaataaattttgacttaaagagcaagtttatcagtctcttgatttccgagcagcaccggggacaccccctgggggatctaccacctcgggcttttttctgctgtgactggtagacctctttccatctgcttcacttccttagaggtggcctctccctgagacctgttatggatggaaccctccatctctgggctctgctttctttcctgcttctccactccttccaatgtatcaatgtccacttctaccatgatctttttttagccactcacctacaaccactgagtccaagataataaccagttccaatgactgacccatacattttcaaccccatgacaggctttatctacccttccctccccatggcccttctataacagattcttcagctaaatagtttctttggtgtcacatccctcttatccttgctgcctgtatgtccaaggagtagagaaatcccacgtcacctcagtcttgctcaatcttcctcgaaggactaactgccattcaacccaatttgctagtgagcccagatcatggcctgtccagtttttctctcccctgactcaccttacctgcttacattatccacaattgactttacacgtttgggttccttcaaagaaactaaagaggaagaatgaagtgttcaggatgttgctcacccatgcataggttcccaacatgcatgtgcctgttactgtctaatacagaagtttctgtctcagatccaagtcacctggacaccacagatgatgaccttttaaaaaataacagtcatctagtcatctgtttgtcatctatctatctacctatctatctatctatctatctatctatctatctatctatctatctacttatctaactatcgtgtatgtgtgtatgtgtgtgtgtgtgtgtgtgtgtgtgtgtgtgtgtgtgtgtgtgtgtgtatacatgtatcaaagctcaagtgtggaggtcagaaggcaatttgtggcaagcagttctttccttctatcatatgggtgccagggataaaacctagtcctcaagcttggtagcaagccttcacctgctaagacatctcaggcccacatagctggtcttaaggatcagaagacacagaccattacctggggactgcctaaaatggcacagctggggcatctcctctagccacgtagtggaggagctcagtaaagcctgggattcactacaggcagcaaccagaatcacagggtactaaggtcagctgaaaccccagagttgtattccctcctctctgccccgccctctttctctgggataaagcgtcttggagaaaaattaaattaagctttttttttttttctttaagaaaaatcaaagctggagtcactgcccagacagttgctggcctgctggcttgggctgggtgcttccccaccctgctccgggtcaggctgctggaggactggggagggaatgaggcaatgctggcagggtggtggcccagggaactgaagaaactgcccaggctgcagcccacacagaaaaggaagcacatttaccagaagcaagcagggatttgcatacaaacaagagagtcacaactgcatttctgaccctgcaggattgctctacctcagtgtgtagttacagtagtcatggacaagtcaggaaaaggccagtgaaacaagacttatgaacacaaacaagaaagggaaaacaaaacaaaataaaacaaacaaaaaacaaacaaaaccaacctcgcaggaaaatggatggaagtcttaactgtgttaagcaaagtatcatgggctcagaaagacatatattgcacattctttctcatataaggatctatgcttctgatttttatatatgtgggagtgttagcctggttctggaaactagaaagaggtcagttaagaggaaaggaggtggcctggtgagatggctaagcgggtaagagcactgactgttttttcttaggtcctgagttcaaatcccagcaaccacatggtggctcacaaccacctgtaatgagatctgatgccctattctggtgctgtctaaagacagctacagtgtacttatttataataataaaataaatctttgggctggagcgagcggggttgactggaatgagcagagtatcttaatacaattcccaccaaccacatgaaggctcacaaccatctgtacatcatatacataaaaccaataaataaatctttaaaaaaaaaagaggaaaggaggctttatgtaatgaggcagagggttctagcacccagcaccctctcttagaaacagacacaagaatctcttacaggctggtggcaaactagccaagtgctgcttggggctagagttgggagttgaaagatatagcttattcaagaatgcaagccattcagacgggcaaatttagaaaagaggcttgtagtgaaaggcttcatcgtgatcagaagagatgttgcaacgacagacacttgcgcttcaaccttgaactaccagactattgaaacaatggaccaaaaagaattaaatttcctccaggaatcccatgctggaggaaaggaaaggtggaagcggtaatgccagacagaagaagatcttgtctcctggggaaagatgccacgtgttttaacaatttatccgaacatctttcgggaaataccagagaagagacggctgtgtaaactcttgttctgtatttaaaccagtggttttcaacctgtgggtggcaaccactttagggggggctgcatgtcagatctcctgtatatcagatatttacaattcacagcagtaacaaaattatagttatgaagcagcaacaaaacaattttatggtcaccacaacgtgaggaactgcattaaagggtcacagcattaggaaggctaagaacaactgatttaaacgtaaacctcaaatgaggacccaaatagacttgaagatcactgaatctccttatttgttcctcttcccatcgaattcatctcatttctctgcccctcgctattaattgtctctttaagcaacatactgtagattcgtgtccagtctcacagacttgaacaccagttggttagggctgccaatggttaagctttagtccttaaacatgtggatgtgggaatgacatagatgagactcaaatcccatttttatcgattatcactttgtgaccttgagggggttacttgacctctctgggcctcgttgatttcacctctggatcatggctggtgattcccaggctactctgaggatacatgcttaaagaaagcacctgggtctcaccatcacattggcattggttttgttaggagagtctgggcaaaggacggtgagttctaagaattcttcactgctacctggctgtttgcactgaccttgcccttgctgcccacacaaggacagattcctgtgcaacactccaatatatgtgagggacgaagatctaggagttgtctgaggattctaaacagcagttttagaatgtgtttcagtggtaaggtgtacccacggttccgaactactagctttctccactcttttatgagtcgatgctgtatatgactaattgtgtccttctgggataagatccgagtttatgtctgaaggaaaaaaatattttggcatcatagtggcacaggagcagtaaaaacccattatggggaaactggttccttctggtcaagaagaaaacaactctgacctggatggagacctaccgttctaaattaccgaaaacataaacaagttaatctagttggagtgtcaggtgagagaccacctctcagcagaatgggcatccctttcatgagatatgtgcttttccttcccagaattcctgtcgagtagcagagctcctgcaagctgccaggaggttctgctgcacctgctcacctaacacagagaagtaccacttttccttttgttttattctgtctcttttgagacctggccaggtatctttcatggtcatttcatactttgggcttccatattatttctccaacacctcctttcccactgtgtggctgcttggacaccgtgtggttgacttccaagttggcttagctcaatgggcatggctcccctcctccccatcttttctccattctcttcctctgggcatctgttgagatttacatcttgcctgccctgaggcttttcttttaaacttgaataaaattgtcctatttaaatactttttggctctgcttgacttttaaacttttcctgtctttgatttttttttttaatcggtagagaaaaggaagctattgttgcacccctagacaaagtcaacaagaataagggagagcagaggagagggcctaaaggggctgtcacgttaaagccgagctcctgtgtcatggaggtggcttggaagggatagggagctcttgccatcccagtcagacaacctgagttcagtctccagcctctaccatggaagcaaaaaagcagcactgtaaaagttagcttctgactccacccatgtgctactgcgcacccacccacacacacacacacacacacacacacacacacacacacgcacacacgcacacacgcacgcgcacacacactctctctcagagtcacacaataataactgaactgaattcaaaacagtacctaataggaaagctcttactatcgcaatgacccttcttgacctcggcctctacacttaaaaggcaggaactgttttatcttgcttttctttgaacttttggccacagccttgttttccctgggcatcacccattagggagcttacatctctctcctatttgagtttcaagttctccatctgtaaaacagggatgaaaataccttacagggttttaataaagcatggatgggtttggaggtgctgcatacagagctattggcagtaatattgtcagcagcaatactcacttgtaatcccaaagaaattgttcttcaccaaaaaaacaaaaacaaaaacaaaaactcttccccagagccaggaatggtgtcaaacacctgtaacgctagcacttggaagagtagggatcaggagtttgagcccagttttggctaccgagtgagttctaggctagcctgggctatacatgagaccttgtctcttaaaactattcattaaaataataaacagagttctttctcagcacatcttgctgtaaacttcacttcatcatcattaactttgtacaaaagtgccatcctggagtcccaggacagaagtggaccctgagtccctaatgccttctgtagctcctgaagttgtaccagattgtgaaacataattagatacctaaaaaaggaaagtgctcattcatgcttctcccaggacggttcagctatttaaaggtcatgagtggtgtcactcaaagtgacctagtccatccagtgacctcatttaaagatgagactcctgagatctagggacaacagcttcctcaaggttgctcagagaacacgaagttcttgatctagaagatcaggtactacaaagcaggtctctcaacagggacagtactcaaaagaaaaacattgttctctctctctctctctctctctctctctctctctctctctgtgtgtgtgtgtgtgtgtgtgtgtgtgtgtgtgtgagactgaagctcttattctgcacctagactcgaaactactaaaggcaagaacacatttaatgatttgcccaccagtgccttgtacttcataaatatctgtcactcggggcaaacaactgcctctgtacagaacaggtaactttctttcaaaagttgttcttagctaggaatggtggtacacatgggtaatcccagcactcagaaggtcctgagacagaaatacgaatcattcataaagatgatcccaagtgctacctgttaactattcagtaaacagccaagagatctatgaggtaaggactaagtactttgtagaatattcaggcaggaattcatactggaattgtgttttattttgtttttctacaacatctaaaatgggatttatttggtggactggaataagttctcagaacatttgctgtaactcaagtagaaatagtcaagtattcacattagtctgtagtccaaaaaggtattttggctaaaataggccaattctcacatctccagtggcttagaatggtcagtgttgtgtttctgcatcttcttcaggctgaggtacagtgctgaatgctagagagggttaggcaaattcatttctcttttgctcaacactgcctcatctccactatgtaaaacctggtctccagtcccactatccaatatctgccttatgtcttacttcaaggctattatacaaaggtattacgttataaaaggtctccagatcactctgttcaaatgttacagatggtttccgtgatgatccaggagcaagggaacttcctccaacgattctcaggtggataaatttggttttccaagtattttccacaaaagatctacggataagtccaaatatttgttcacatacacccaaacaagaatttcctcagtgggcagtccctgcaacgccaaccataactaatctataaggagaagacgcacattttagtccttgagaatcaaggttggtactgggaaatagaaattcctcttaaactaatgacagtaagtgaaggctcacaatttctgctccatggtagtctgtcaatgttttgttctgaggcgttaaaataaaacctgagctgggctgtggtccccattcatcttgagatggtcccagaaaaggatcctgagaattaagaagttcaaaaaatccagtgacagaattcttctcctaagcgacaaaaatcaacattttcaggtttgttatcgtcctttgcctgctgctcagagagcttcgagtcctccagctttgtaactggctctgctgtctcctccgtttttggtgattgttcttccaagtaaccttttgcatactgaataagattgtgtttttcagtagttggagatacagccaccccttgtgttgccaaatacttaaatatgactcctcagtggacttttttgcacctcagaagttcttctacattttggctatacactcatattgcacgaatagcatcttggctgttggtgacagcatggaaaagggtcctgatcttgtccttgttctgcatgctgagtagttttcggcagtcctaagtggctgagtcccgacatcctgcccctggggaaggaggcagaggatgatgccaccactgatgtcaccctcacggcccataggccggccggcacctctggaattgtgtttttgtgtgttggtggtgtctgcatatgtgtacatatgtgtatataggtaagctcacctatgtatgcttgcacagtggaggccagaggttgatgttcagtgtcttcctagataactttccaccttgtgtttggagacaggaacttggagctcaccatcttagctagattgactggccactatccccctaggatccctgtctcgtccctctccctgcagcactggactacagacgatgaagatgacgaaaacaacgagacgacgacgacgacaactggcctttatgtgagcttccaatattcaaatgcgtgtcctcacatttgtacaatgagcacttaacccgcccactgagccatcttcccagcctcataattatattttaattgcatctcaattaaattcttgttgacaaaaatgagaaaatattaaggaaaaaggccacaaaatcatttgtaaaacaagtcgctaggtgtgatgtttcagaccatcagaaatgtttctttgcttcccttcacctttgaaattatctcttaaaacactgcaggtgggactggaaaggtggctccacagttaagcatggctcttgctcttgcagaggacctgggttcagctcccagcacccacattaggcagctcacagctacctggtattccagtgcccaaggatccagggttctcttctggcttcctcagaaacctgcatacacatgatgcacataaacacaggcaggcacacatgtgcatgaataaactttcacatgtatgcaaaaatctttaaaacagtcacaagacaaggcagaaaggcagagaaatttaaggggccacgggaagggaaagaggcctgcagcccagggacctagctgatgggtcctgttgaacgagggagggtcaatgaacttcaatgtaaccagcaaactgacttacagagacagtgtttgtcctcagacagacatctcagacaaggtagggccacattatttgtgcctctacttgcactgtgctaaccatcttctctcagatcctaaacccaagcaacgtacttcatcaagccaccttctaaattaatttacaaaaggaaattcttaaagaaaacatgtaaataagcctttttaaacataattttattatccgtttgtgtagggatacgggtacgtgtgtatgttcgtgtatgtgtgaagagacttgtatatttgcatacacgtgaaggtcatgggtcacccaccagtgtcattcttctgtccacctcagtttttgagacaagggcttttattgcaacctggaattcaccaactgggctaggcttactagccaacaaccccaaagttgcttcctatttcttcttcccgcccatgctgagattatgtctagcccttttgcataaggccttcatgacacttgtcaaacacttcactgagctatttctccagccccaccctcttttacttaaatgtttaaacttgacttaatcattataatactgtaaagtataacttttaaacagtgcaaattaggatgacgaagagtcatctctagccgttataaagacacccaaggtaactctcagaagtatgtgctcagatctgagtgtgtactgaagttctcctaaataccccatccacccaccccaaacttaaatctaaagtgttttttggttactttattgtgttcttatatctaacaccttttccactccaatcccttccaaccctacaacattaggtaggtgagaaaggaggtcagaggggaaagggggtgttgatctctcttgttgattaagggtgtcgagttccttgcagcaagtttgaccttctcggtcaggatatccaatttcttcttctgtctttgctctgatcacttgacaaactgcaaaaacagccaccagcagcaacagggggagcagcaatctcagcagcctctcaggctgtggcacttttgtaccctctcaagaccagaatcccaaatacagaggatcttcaactggcaaaatcactcccctcccagagagtgagacaaatcatagtctgctgctgtggactatccaaggcagccccatatcccacacctaagactaaatcaaaaacatattcatataacataactggattcttaaagaaacccaaattctcgatacaaaaaactgtactatcatctttacaacaaacactctaacttcacttcaccctggttcaacctaagattcttttcttacgccgtagccaaggctccagctttgcttgaggggggtcccctaagagagccggctgctccataagctactgatagggtgctgagcctcagcactgtcagcacaatagcaccaactcaaacaaacctagggctcaggatagtttcatggacccctaaggctaatggttcccagactaggctttctaagtaaagtaatacattcctttcgctgctaaatatatcaaaattaggttgctatttttctaatggaagagagattttacaaatgacaactactgctactatttccataagataacctctcgtgaaagatgggggtagggtatactcttagaataagaattctatgaaggtacttgagtacattataagtagctgctgacatttcacaatgttcttttccattctgcccagacatgagatctttgtcatggatatgctctgatcgtcagccaacatcttggaaccactgttctgggtgacaattaaggccaactccctattccccagaacattatgtaacatccaaaggcttccaaattgtaccagaaggtaaagcttctaagcaatgctgtcacctaaagacatgcatggagttgcagcctacaaattctgttgcttctttctgcacggcagtaccaggcaggcatcaccactcagccagctcatctttacagaaggcatctatttcccaaagcttcagtgttaaggaaaataacgaagctagggcccacggttgtcaatatccactcacagcatcagaagctatatgctcagctgacactgtccccagctgttggaataaagctatccctctgtccccaacaccacacacacacacaaacacacagagtctgctacaactccctcaccatctcggagcccagattgttgtagtgacctatagaatgcctggcccagttgccgtgacaacagaacacagtgggattctaggtctatagcaaatgtataggactgttactattccctggaggggcaaagggagatcatagaactgagatagtagtcacctctctttctgtccctcccagttgcacatgatcttgggaagttctcagtatttaagaaatgcaaggttaactgaaggtaggatttcatgatgcagttttatatgagatcatcattgctaaggtggggctttgcagtgatgccactattctggtgtcacccacactttataaactaaccatcatgctcctgtaagtaagatcattggtttgtcaataaatgagattattggtaatctaggcttggctagaattgttcctttgatctgacatcaaattctctatctggggtgaacagacaatctgttcatgtgtccccaggaaaaatcaatcacacaacaccaacatgaccctcttttccctctaaaggtgcataaacttctctccctgagaataagtcaccaacaaaaatcacaataatgtgtcaatttcaagtagtgggtgtatagattatctgggaaactaatgtgacatcttccttccagtgggggttgggaggatgggcagcggcagagaaagactcaaaactgatattcatagagatagtaaagataaagaccaagaccaaggggtgattcaaaggactctggacagagatttctgtcacagtctatgtagctcctccaaaacaacaacaacaataataataacaacaacaacaacaaaacaacaacaacaacaacaaaacagatttgccaggcacagtagtgcaagtctttaatagcatttgagaggcaaagacaggtgatctctgatgtcaaggccagctgggtgcccacagcaagttccaggacatccaagggtacatagagagaccctgcctcaaacaaaacaaaacaaaacaaaacaaacaaaaatgccacagacattcctgagccttgcaggacttgagatgattgtagccagtactggaaagcaggttatagcagaagctttgattctagtaaggaatggtgcatttgcatcactgatgctcagcctcaaggaagtttccagaaactgtcagcctaaatgtatattcaggctgctgggggaaggggccctgaatatctagatatccagacagccctgtgacaagagtgaggcatggagatatgtttgggcttccctcagggcaggtgatcagctaagtggcctggcctttggatgctgtgcacgaatatccagagcctaggacactgatgcatgactttccctgcggactctatttctattcactccagatagggagggccagggcacatcaaacaaatctaaatccagcctagtgagcccatgagtttaattgggattgtttaaggacagctacaccaccaaagaattccccccccaccccaacccccttccctgcccgctaacaattgttaactgtttttatatccttgggatggctgggactgaggagacatggtctctcctttcctggaatgttagtgagcccagtgagggtggtctcacgtggcaaccagggctcagacaacagatcattccagcacagtggcccctgcagaagagacactcttaaaaaaagggacagtgttccctttttggacagtcaattaacatgcgcatttcctggcttcccttcactgtttctataaaattctatcactatggagaaaagccagagaactctggaatctctctttttatactttgggcaaactgtaaataaacaaaagctccatatcaaatacctcctaacttcttttaaagagtgatgagtttctgaatctaagtcacttcaaagaccaagataaaacataccagtgggttgcaggtgtttgttgccaagcctgagttgactggagtcgaatctccatgatccacgtggtggcaggagagactcccaaaggtattttctaaactttacatgtgtatcattgtactctcacagacactacacacacacactcacacacacacacgtgttcacaaaatacacaaagaaataaaatttctgttttgtttttgttgttgtttcaaaagagggtttctctatgtagccctggctgacctggaacttactctgtaggccaggttagcctctaactctgagatctgcctgcctctctctacctcctaagtactgggattaaaggtgtgtgcctatctatctatctatctatctatctatctatctatctatctatctatgtgtgtgtacatatacatatacatcatatatatatacatctttccatcctatgcattgtaaccccaatgatgggggaataagattctaaattatggctttgatccctgttttttctgatcttaacaacaggctccctttggggctcgggagcacttatcactcttgcagaggactcaggtttagtttctagcacaatacagtgagtagttttataaccctctgtaactacagtttcagagaatccaatgccttcttttgacctccatgggcatcaggcatgcacgtggtataaatgcatgtaagtaagaaaactttaataaagcaaaataaataataaataaataaataaataaataagtgaatattaaaataaaaataaaagcaagtcatctatcaggcatgatggttacctgtaatcataccagaggcagaggcaattgggtctctgtgagttcaagatcagcctggtctatataatgtgacccaggccagcctaaggccctaactcaaatgtactggtggcctggaatcatctgaggcttatttgttttgttttgtttgttgactgattggtgtttttaagacaggtattactttataatacaggctgtccttaaactggctattctcctgcctcagcctcctgggtgctgggattttagacatatttcatcatagccagctggtccaagacttttactttgcctcagctccctcatgactttgactttttatcccctaaatctgtcacttcctccatttagagaggtctaggtttgggaagcagagtactgtgtgtgtgtgtgtgtgtgtgtgtgtgtgtatactgggcactgcttactccagaaacaaatttaagtacattatcataacctgaacctgattatggaagtccatgagtaatttttgtattataacaatcacaggactagaagccagagctcaattctcacgccagcttcaagggctccctggggagtctggttctcagtggatgtgtgggaaaaaacaacttcccagggtggcgaatagtttctagacccttgaggagaagagctagagtcatcaccaggtgcacacctaggcctacagctcacagcccagagtccaagtttagccaaggccctagaggaactatcaatgtaacagcccctaccccccactcctaaccacccccattagaggccagtccacccaaatcctctcatttctccttggagtccattcaaatccctggggagcttacaaggttttatttttgtgggggctggagagatatctcagtagttaagagcacactggctgttcttccagaggacctgggtttggttcccattgcctacatggcagctcacgaccattggtagctccacttctatgggatccaactccttcttctggcctccatggatatgtatatggtacacagagacgcatgcaggcaaaaactcatacacataaaacaataaaataataataataaatttaaaaatatattattttcctaagaaagggtctagtgtagcccagcctggcttccaatttattatgtaaccaaaagtgatctggaacccctgttcctcctacatctccagtgctaggactataggtgtatatcagcaggccaagcaggcgctcagccacctgaagtacatcttcagcctccagaaggcctacaaagccccatgcgggccacggcagccttgtcctggcactcactgatggttctcagctttgggcccagcaagcaacctgcactcttgtatttagagcaacaggagagaaaattttgcagggaagccaacaaagcaaggcacaacagggatgggagtgactgtggaatgccttatacccatgccacccatgggatgcccatgccactagcaccaggccttggtctagagaggaagaggaggcttcagcagcgataatggcttggctttgttttctgtgggtcccattcagtgtcatgctgccaataatgaatgtaaaatttttaacagatggaagttactgtgtggggtcaagattcacgctacaagatttactctacacttatctgtcggtcgagtcagctccatcccaggccctggctatagaagattggagacaccgctccggaggtgggaaagcacagtctgagatgtgggaaagccagggctggttcgggggtccccaggcctgtgatgagttcagggccgtggggttctcagactcttggacatccaggtgcagctgggagtcacggaagagcagggaatggagtgtgtaataaatctaggcccacagaagaggttgttaccagagctgaagagtgggggaggaaagagagatgtggggtgaatagtccaaggaaagacagcttagcctatgcaacagcttagagaccaaaagatggagctcagcatcagagatgtagtttgcaaggcagctctgagactcaaccttctgggaatgtcttaaccgggagtgtagcctttgccctcaaatcagtgggaggattatgggaagaactttggcatggatgaacaaagacatttgcatcctagagacccaaaggttcctgaaaaagccagaagccacttttgctcgggcatcctctaaaacctacgggacactacaacaagtgttccatgtttctctatatctgttttgcctaggtcagttaccagaactcagtgttctgtagaagcctaggaggagctcaaaccaaatgtgtgagactcaggaaaaaaactcataggaattaccctctgaacggtgatgaaataactaggtcaaaagcatattatctaaaagagcagcaggactccatgttagaaattcactcactcacatagccaagtcctataatactaggctctgtcagagacagcccgtggttcatatctttctgttcctatttagcagttggtgacctggacaagcagtttcagtagaacatcctcacctgagagagctctctgtccctcaaagtgtcggttgaaagctgactgtcataaagatggaacagtgccaactgctattctcctttcattaaccagctcactggaaatctagatggtacccagggatgacgggatgaaagagacatgccaatcaccttagaaggcttccactccaccagcaagccctcaccctcccacccatatgcttcttctattgtcccaacccagctcttggtgctctacaaaggcagacaggcttaggatctatctgtaggtaaacgtgtcctaccagcaccacacaagctcctgatcttaagaccaagctagcatcaagtggagaggaagctcttccactttctgtagatcagacttagtatatttgaagagcttcacatcaatacaacgtggagattaaaatagaaaaggatacccggcccttggaatgaacaaggtacctatggcctctctagaaaaccacccttcagttagacagaaaacaaatcatgaaattcccactcacatgtggtcatggacacagaggagggcaaatcagtttcagccagcaccgttcctctttggcggttaacatagccaatatgactccaactaggaattatgaggattggaaataggcaaaaggttatgtgcttaagttgttctcctgtgatctgatcggccttgcctatcaactatatattctacgtgataatcatctttgtgttcccagcacccactttcagtatcctcaatgtatagtcaacatcatgagtctctactgagtagccctgaactccattatcagtatccttacaactgccagtagctctaattaatgtcctctgcatggagtttgccaacatgtgtacacatacacatgtacacacacaaatgttttttaatagttaattagtaaggtagaaattgcagttgtttctacagaccatttgaactacactgggatttttattgtttttattttatatatttatgtctatgggtattttgcctgcatatatgtctgtacaccgtgtgcttgcctgatgtccttgcaggccagaagaggacatcatttcttctggaacatgagtcataaatagctgtgagtttgtggcaaggtgtgtgtgtggtgtgtgtgtgtgtgtgtgtgtgtgtgtgtgtgtgtgtgtgtgtgtgtatgtgtgtgtgtgtgttggggtgtagtttcagctagtccagactatactgagactggccttgaacttctgatcgtcctgtcccagcctcccaagtactagtttaaaagtcatgtaccacttcatagctttaactacctattttgaaaatcagtcctacttgtgtttaacacggcatgagaagaaactgccaggaagccgtttaggaaaatctgtttaccaaaattctacccaaaggaagatgctggcatacttgccagtcaatcttagttacaaaagtctcctccctcgccctcttctgtggattttatttgtttgtttttattttttgacatagggtctcatgcagcgaaagatagtaaccttgaactcctggccttcctgtctccatctcccaagtgctaggattacaagtatttgccacatttggctgtttgccagttgattttaaaagaatctgatgatcacccaaagagaaaaggtgaaaggaaagggcataggtcaccaaaactgctctgggtttcctccagtagctctccgaggtttgtcataagtctagacctcctgaaagctgtttgacaggagagagccaaggtaactgatgaatgacgattttgcttgctcagtatttgcttaagtacggttcaaaatttaggcaggctacagttcagtgataaagcctttgtttagcatgcaaaaggtaatgggatcacctacccacacacagacacacgaaattaacgaattaacggttaataacctgggctatttacaacaatttctgaagtgatttgtgcttggataacaaacacctcatcttcaacagtttgggaagttggacgcatcccaaatatatttcccttcctctaaaacaggattaactacgtctcctctgtcctttctttagctgaaactggatacatgtgtgctacacatttagaatattacaatagggtcagttagtagactcagcagacaaagcttagcaagcctgaacaccccagttcaatgccctggtctcatataaaggtggaaggattcatcatagttgtcttcttagtttcacatatcctttgtgacatgtgtacacacacacacaccaaacacatacatttgaacacataaaaaataaatcttataaatccaactgtaagtcatagtttaaaactgtggggactgggtttgtttttcaattatgataaaattcatatttaacatctaagtcttccctaaagacccaaaatgtagtaattgcaagattttaagacatacaaagttgcagagtctggattggaggcctgaagctacacagaacacttcttagaggacagagcaaagcatcgaggcacttgctgtgtcagagcactccacgttaaggcaagaatgtcaaggaaaaccgacgtgaacctaacattcagggaggtagacggggttactctggtggagtccatcacaaggtcttccgcttcatggagttcactgtaaatatttgctttagtttttacaacgggaaaacagaggcacaaatgtttggaggacagacacagtgagtaatacctacctcctcccaagagtgctctaaggacccaaggacacattatgagtgaaagtggtctgtaaactaaagactgaaataaggatagcaaatgcctcagttaccacagttcagaaaaaagccaggactcagtcaatgctacctcacgttaccacagaagtgtccctgggtaaacgtgaatagggcctcctggataaggtgccaaagagcagttcttacaaggcagggggtagggccagggtatgactgagatcctgggtaccctctcagtaatatgtcatgtgagtagcagcttctggtccccacacccactcatgccaccatcccaagaagagtgagtcttttaaaaggcaactctagctcttaaggttgatcaccctatcttctgggtgtatcacatactgcagtacagatttcctgcagtgcatgttggaatcggtctgtacatacattgcttgtgagtatgtgttagaagctcagtagccagggctagaggcaaagctcagcagttaagagcacttattgatctctcaggagacccaggtttgcttcccagaatccacgtggtgactcacaaatatccataactccagttccaggggatccaacgccctcttctgaccttctgaggcactaggcatgcacatagtacacagatatgcaaaactcatacccataaattaaaaaaaaattatacaaaatagtaaataaactcagaagtgaagtgttctttcttggttggtcaaagagctcacaggttgactttttcttttgaattcaccttgcacaagagataatatgtaagaacataaagtcagtttgctggtttatgttgtattgtttcagtttctttccaaagcataaagggaagagaactctgtactttagataaacatgcacacatgtacacagagagaaaggggagggagagatagaaagaaagagtgcgtgagagagagagctcaattctcaagttaaagagatggctcccagagtactactacacaattttgatgatgtaattctcaaacctgtcttctgatctccacatgcaaactgtggcatgtgcacggttgcatccacacacacatcagatacacatgaagcacaacacacatcagatacacacacacacaccctcaaagatcaatctaagagttcctcgggcctgaggacatacctcagtggcagagcacttgcttgccacatacaaagacttaggtttaagctcacaatgtccaagagaaaaggacaccagagcaaaggggaagctcatagaaatgatatagcctcctgacacacaaggggtgtattctggatttaaagataaaaaagaaacctgcatactttatagggcagggaggctccaacctgggcatgcatcagtcacctggagagcctgatacaacacagagcagcttctagtgaacaaagctgaggtggcatccagaatagtgctggtgctgaaggtccttggaccacacagcagtactgagtccagagcaaggcatcactcacagctgtctgtatcctagttggctcccactgccttttggcccagtaaatggccattataacttccacctacaggaactatttcactacttgcttatgtaatcttgttgcaggcattttattagtttcatttaaaaaccaaaaccaaaaccaaaatacatatatgccaggcattatagcctctgatcttaatgggctccctgctttgttaaattgaccccaattctgttaaactgacctcaatcacagaggcccctgctaaaagcggcgtttccttatatctagacaactacagtttttgagcctttatcattgtagggggaagcagatcactcccagaaactttgcttaagcaaattggaccaattagtcacagatacccaaagtaaataatcaagcaagcgctgagaggatctgcccttaaaacccaggtctccttaagaactcattcagctactagagtcaaaggtcaagccaggcagcagccgcaggcagaggtgctaagtctgtggatttcttctccaagtcctctcagtctctgtgcactgctcagttgctaactctggaggtcctctgtccaacccccgccattctgcctgttcaccagtcacattcattcagaaaaaaaacaggtgttcctgttaaaattagctgtctcaaactgcaaaatatctcagacccctataccagctttaaaaggaaagtgaaaaataactaccattcagccgttaactgatgtttccagaatgacagtcacacacacacacacacacacacacacacacacacacacagagagagagagagagagagagagagagagattgatttgcattcttaccaagaactcaggatgaataagaaagcccaaactttaaactgacaaagaaaggcttcttgtcttgttttgatctcttttccccctggtcatgcctgaaagcctgctctgtcccatttccttcggttgactgtcatagacaatggcttttgttcggggaacttagctggttttagctggttttctgtctttctctttagcatgcctaaggaggttcttggcatctcttggtcagaaaggactctgcattaaacctgacttacaaaccttgacccagaaaagtcagaagaacccagggttggactgaagttagtggtggtgaagcttaatttacatatttataaaaagaaggctgagtggaatgaggccgttctgattttatttctggaaccagtaactctgctgacctcattacagcctattatgaaataggttgatgtacttctttaaaaaaaaaaaaatcaaggattatttaaaagagaagtttggcaactaatatattggaaggaaattagaatgccaaagaccagtgcccaagtccctaaccaggcactgcagacacacacagaacggaactgtgtgctactcactctggcttctaaaaacctgcttgaaaagacagagaaaatttcaaggcacctactgtcagacaaaccccgacccttataaaccaaaaaaagaaattaaatatcacatttctcaaggacagagatttttaacattccgcactcaacccctatcacatacacaagcactgagacaactgtgagaaactctgtgagaaagagcagtttcaaatttaatgtggagactagctagttaatgtcatgcaaggagatagggcaagtctttttgccttttggcttgcagttttaaaattagttcttcaaggattagttcttctggctcttaattcctttcagtttactctgtgatatctgcagactaaaggaaccataggaaatttagactttatcatttgtgtaaacccaacgaatagaaataatttccatgtgtacataggacttcttttggcagccctcttgccaatctacctgcagctgatctagactaaactttacaaaagaactgggggggggggggtaggagcatacccaaggtcacttcattttactttataactcttgcaagatctaattagagaaaacaactgctcctttgaccatttctcacttaattcctaatgcatatttgctgtgctgagacaccaactgtctatgctggcctcagacttatggcaagacttcgacttcagtctctgaagtgttgaaatgagaggtgtgagcaacagccaggtttgctctgaccattgaaaataaaatgtatacacactattactttaagtttttttttttagaaagtgtgggaaaaattgattttataagttaaatttcattttgctgctaacattttatggtgacaacttttcagatctgtgggcactggaaaggtttaagcacaataaaaccccctgaaaaagtaaatgatacactgaaagcctacaggagttttttgcgcatgtggctcatccaggtttcaaggctatagataagtttgtcactctatttagtaagaaactattcaacagtgtcttcaacaagccataaactcccccttaaaaagtccatcccaaatttatttatctacagaaaagccaaactacctcgacatgatttcaatcaacaaaatactctttcaatacccaaccagccacttgaatcaaggtcataaaaacaagccctccactgacaagcatgctctagaaagttctaagtccagaggatagactcttttatcaaactgcctagaaccttctataaagtcatagagatttctgggttaggcctagcctcactgaagatgctaaaggatcagttgatacagtgctgttaagtcccatgcaaaattctgtgagctggcaaggcagcaccccacacagtattaggaagtactttaatctgaaaatgacaggccgaatacaaatcagatttcagtaagcctgaacctatggctcattataatagagaaatgagtggaggacaaagagagctaggttactttccagaaaaactagagggaagaagacaaaatccccactaacagtcctccccactaacagtcctccccactaacagtcctccccactaacagtcctcccccacgcactgcatagtccaatcacattcgattgcctttaaaaatagatcacatacatttgtctttctagggtgcaaggatgctcagaggaataataccagagggaaaatggaattttagagtggaaatggttaggcactggggattcacttgccaatggatgtaaacctttttccccccacagctccttcccacagatggcaggcggcatgcacagttagtgaaaagacagtaactgcgaaaagccatctgagaaacataacaatttaatagatgaaataaatactccagtacatgcagggtaaaaacttgacattggggggggggggaaatcactctatagtgtaatttaaaaaataaaacacacgctcacagtagctttcccccccacttgcaaatcatatggcaaagtcatactctttttcacaccatgtatactctaattcaacaaaaataacgacatacaaaaaggtagctacatccatgtctaaaggagggaaaactgaggtaacctttcattaattaaaaagaaggaagaaatgagcccatgacctctttcctgcccaattgataactgagttgaggggctcgagtgtgtagggttaaccctgcagccagcagactacccatcttctctgtgtctgagtccctatagtgggctggtggacacccaggccctctgagtacttgatgattgcatggccctgccttctggaaaattcctcttgagcatttaacatgagggaggggatcacctatggattctttggtataaatggagaggggaggggttaagtgtcttcctttagcctggggtggaaaacaggtataggggctggggtgggggtggagcgtggggagtgctaattcacagaattggaattcactggcggtaaagtcctgggtgaagacctttcccttaaagcctgagatagcagggtgcagccttcagacacggcgcaggccgagttcctcagcctctccctgtggtccgacatcttggcgctcccatctgggtgctgcgccagatccctgaggcactgggtcaagagcacgcaggccgacaccacactcatggcacctcccaggatggcggtctgcaccgccttgccctcagtgctcacggcagctgcgcgacccaggaattgaggctcggtggcaaagcccaccaaagcgctcaccgcctgcaccaagggcccactgaagagcgcgcaacgactgcgggccagctcgctgggtgccgccttcacttcgcgtacgcatgctaacagcgcggatgcacttgtgctcatgcacttgacgcccagcttgaactgttcgcgagagaagcggtcccgtgacttgtcactggccagggcgcacgcatccgtcaggaacttgaggtttcgagacaggccctgcgacacctccagcaacagctgtggggtcatgtccgccagtggggtggctcgcagcacagcacagccttgttctacctcgtggcggcagcgtgtcacacggtagcggtccacaaggcctggctgtgcaggttgagcgcccggtgtggccacggctgccaggtaggccgcatgtgcagaacactcggtcagcgacaccaccaagtcgcccagttccacaagactgtctcccgcctctccgaagcggcccatgttgagctggctctgcacgtcgtgggtgaggatggacagccccttagtgcgcgcgatgatggtgtcccggcactgctcgaaggactccgcaccagcgccaggggaggcggggccttcgaagagcaccggccgcgcctcgctagacagcagcagcaggtcggccaccagctgcatcttgcccttgcagtgatcacagatagataccagcctcttccgcggctgcgagctggccccgccgacggcgctcccaggagccggagaagccgcctcgccagtgggcttcccggcgctgccgctagccatcgcgcccagggggcactggcatgccgctggggagcccgctaccaccgccgccgcgactcagctggccagggccgcgctgccttccgcgcaccatcatgccacccaccgcggcgggcacagagatccgggtggcggcggccggtggccgggcgtcgcagggcgggcccaagcccgcggcaagctcttcggggcgctgtgtagctcgcgggaaccgtgagccggggcacggcagactcctagtccgcgcccctcttcactagcctaccagaaaagtccccgctgccgggctgtcgccaccttcctgggcatggccggccgggccgccggagcggagagggcgggacggggaggctgggagttgtccttccttccttccttcctttgaaatcaaaatcctctgctcctagaggagcgcgggcggcggccccggcaggctttgctgtcagccgctgcgctgcggctatccggctcagcagcgcacgtgggcttcaggggcggcgaccccgccagacggtacaggctggcgacggcggccggagctgacgcccgggggcgcgcggccgcatctcctgctccggctcttagggcgctgggcggccactgggccgagggcgtggctggctctgtggcggccgcgcggagtcagtcgggcgggaggctgcaacgcagggtgctgggcggccgcgccttcccgcctggcggttcagagtgcgcggcccggcgccgcggcggcacgccctcccctcctgaatggcctgcggccggcgaccggctgtcgtggagattccatctgtgtttccccgcagagcccgcgggccccgcgcatccgacgccccagggtggtcggctcagaaggtgagcgcggcgtcgcggaggccgacccgggcccggactcctgccatgtttgtcaaccagcaacttccgagcgacctccgagcaactgaaaggaagggaggagaccgcaggccaggggacacccgcctgcccgcgcacggttgcagttttcgcctcctggcgtccgcctcgcccccggctcgccgccgccacctcggccgtaacctccccggagcctataggaatcttttgtgtggcgtcaccgcctttcgtttaaatcccgcttcctcctctcgcccttcctcccgccccctccgccgatcccggatgcttgcgcgatgcgctgctcctcccccgggaagctgggggccgtgggaggacgccgcgcccagccccgacgctgcggccctggggccggtggtccctgcatccggagaggctgggaagcgtgtgtggtggggaaggcccgccctcgctccgcgcccaggcgctgtgtataccctggggacaccggggcgcagccgctagtggccttacgtaagctctcagcatgccccaggactcgatgcttcctccctgccgagggagctagtgtaaaaggtgatctgttttgcttgcttggggaggatgccactcattactcccgggatctccccaccgcctccggattccagtcacctctgagattcgatgacttttgcaagccctcctccgccctttgttgtgttggaccctctcctgtgggtgggtttccgtgaaacagtgaaaaggagctctgatcacgcttgagtccccacagcttgtttgactcagtgatagaccctccctgaggttggtcttacccccccccccccccagccgtttaggagttgtgtgaccttgggcaagttttctctcccaagttactgtagtcaggtagtgtatggtgacctcggttccagctggctagaattccaatgtgccttgatcagcagttcgccctttcctgactccatctatataatggaataatagcaaccattgttaagtaaagagccagtctctggaggtaaacactgttatctctgggttacaggctgggaaactggtggcccagatggctccccgccctgtaacgaggaattaaacggaggaccttgagctactgtactttttatttattaatttaactgtgcagacaggctttgaacttctggcgatcctccttcagggtctgtagttggtgattgtaggcctgtgccatagggctttgtggccaggtggactaagtgactccctaggctcttaacaacagcagtggctaaaagagaaggtcccctaaacccactggccacacccactccctttctttgtgcagaccttgtctgccagaaactcctggaacacctgggcctcctcccagtaaagcactctctcaagagccctgaagtcttctgctggtgcccagcactgccagtgtgtgctcagccaatggaaatgtttgttcttctgtctcttcgtaggacctccacgtcctacatttttaagccagttataagtgttatttataagttggatggcctcaaatttatcgtccaaaccccaatagtttacagaataaattatgagtcaagttattaatataagttaatgaggaacaaccggtaaaaacctggatagccgccctactcataatcaaaaataataattaaaaaaaaatgcccttgcagatgctttagattttaggtgaaccaactgtctctgcaaactgaagccagtaaaaccaatggctctcttaacaagaattctatagggctacttcctccctggtaacccaggaatagcagtgaatcctaaaaaatagtttccttaactctgagaacctaagagagggaccagtaagatagctcagcaggcaaaggtgcctgccaccaaggcttcgtttttcagatagtgtcactcttcctaaactgatctttccaggttctttcttgtttacctcctgccattgttcacttacagctcaaacgctgggtgtctaccatgtgccagcccttgttcaaggcactgcgcttacactatagattgtaatagagcagcctctgcttgtgaagataagagtcccggaagggaaggttcacaaataagtgctcccagttactgtttactcagtaaaagcacaggacaaaaatggacagcagatcaaccactgcatactagccgggcagtgatggcgcacgcctttaatcccagcacttgggaggcagaagcaggcagatttctgagttcaaggacagcctggtctacagagtgagttccaggacagccagagctacacagagaaaccctgtctcaaaaaaccaaaccaaacaaacaaagtactgcatactaagtgtttaggtcatgttaggcagaattatgcattctgatcagtgctagggaaatcgaggtgacctgcaaaccaaagcagtggaaaccaaatctaagatctccctgttccttctcaccttgctcttcctgtcactgctggatgggtagggggttgggaggttttttttgaggggggaggtactgtgcccagcaccatccaccttcagaaaagtttcatcttccctgacacactacctgtgaaataacatctctccattctctcttctagtctctggccattaccaacttcatccgtgaacttgatgatttgaagcactccgttcttttgtgtctgtcttatttcattaagcataatgtcattgaggttaatcagtgcgataacgtatcagaatgtcctttttataggaaataatattcacttgtatgaactttagacattcatggtatacccccagaatttgtggacaagcaaccaagctgtctgtggtatacagtgccacccagtggttggtaaggagcagtcttggccatatcataactttggacttgggtttcttggttttatgtttgtgctcacaggtggacagtggtctcagatgatctttcttacacatttgcagacaccttggttcattctccttgagtatcggccttggccaggtgtggtgtcacacactagcacttgggagatagaggcagcaggatcaggaattctagatcatctgccagccaatgtaaggagtttaaagcaaccagggctaggcgagacctagcctaaaatcatcaacaacaaataacacttctcctggagaagaacaatttacaactgaaggatgcggtcccatcccctttatattattcatcacagttggtacataagagctccttactggctagagtgcagaatcaccatggaataagactatcctccatagttggtatattctctagccctctgacacatcctgatcctgtccagtaacacacttggggcaagactttggctttcagtttcttatcttctctgttgcttctatagtgagcaaggaagctgtgcacaggcccagtgaagacactgacacaaatgctggagtattcagcttctagtatctaggagagtgaggatttcctccaattgtttcccagggtatcctatgatgttactattgctataagcctcactggtaccatagtaaggctgcttgcacaagatgatcgtttcatagcctattccaccagccagtgggaaaaaatatgaatcccaggacttagggaccataggcagccaacactaaccattcctggtcacgatgatacctggtggtcagtacttacagattaactcaggctgttgctgcctcacacgcagcttctctggacctttagacacacttgggcatggctgtccctcatttctactgtgctgtttgcagaacctggttgaggccattgccatactgtttgggactactagctttgctccctccacaattctgttaacctgtgaagaacagaggcagtatctatgcccccatccgagtgccttgtatagtcgccagacagtgttaatagaatccatttgtcagactgtcccacaattcggttctttttattttaaagattatatgtaagtagctgtcttcagacaccccagaagagggcatcagatctcattacggatggttgtgagccaccatgtggttgctgggatttgaactcaggaccttcaaaagagcagtcagtgctcttaaccattaagctatctcttcagccccctataattcgattcttaaagggttaatgtttggctcctaccaggtcctagggctcattgatgacagtgtcattcaggttttggatattgctcatgcaaggtttcaggtagtgttagaaggtgttgttctcactccttagctgtggagaatgtaggccagcatgaacccaggctcatgttctcattaaacttaggatgcactttggcctgagtatttaactcagagcctggcccctcgtttaggcactgaacacagttttatgtccagcccctcttcaacagctctatactgcactgcctcagacctggttcaaattccagggccatctgagttctcctggctctagctagaccttgaaactattttctatatggctactagtgttgttatgctgtaagcctcgctggtggtgccatggtagacatcagggaagaaagtgtcctggattcctgggtccatattttcattccatggctataccatatatctgaccacatttgaataattccaacacttaaaacaaacataggggcaagatctggggagatggctcagtgggtaaagcccttgctgagcaagtatggggatcaaagtttgggttcctaggatctacataaagctgggtggaccagccctcaaggagacaggaaaggaaatctctgtagtaagctatctagccagatgagtagaaatggtaaactcccggttcaaagaaaataacctgctttattatattactaagtggaaaacagtgaagggagacactagatattaatctctggccttcacatgaatatcacagaaagagagagagagagagagagagagagagagagagagagagagagagagagagaagaaataagtacagactaagtacagacatttactaccatggcccctttagctcctaacctggaatctgtagcgtgtactgtagatggcttagcccgtctgctattgcaaaccctcctgtatgataccaaggacttcaagttcaccttcctgtcaatgtctcacctgcctaacagtaagtcattagacaaagaaggttcttcagtgttccaaaacaccaaaatatacttagtctgtcaaatgttgaaaatgtagttgctccaaatgttttcagatcaatggagtgggagccagatgtgtttcctcctcagatgacagtcagtagccctggaacttctgacttgttttaacaattgtggtacaatacttaaaaaagaaaagaaaagaaaaacctttttatttttctgtaactagatatttcaggccaagaaaaccagcattttttttttttctaaaccttaccttggcagttggcagaatgaatgaccagggtgaccccgccctgcagagcacatgatctgccacagctgtgcatgttttttagcatgactgtgccaggacagagctccaagccacggggtggagcaatgtgcccctgggagaaggctcatgacatttcccttatgatttcaaaaaagaagagaaaaaagttctttttcttttcttatgagttgtttctgtataacgtcaacagaaaatgtccttgtgtttattcatatccatgtatgaatatggaaaaaatcagctacgttactacagtgggaataaatgcacaccacatttgaccttagagtgaaggtcaataaggctcacgttgctagttagctcttttcttaacctccactttatgcttttcctaacaagcctaaatttatttgagatggtagcaaagacagctaaataattactcccagtccctctcagagaggtagctcaatgagaccagaaaggctgtgcacaattccctaataggatgctcgtccctcagcttgacttatttcccatttcctttgattggaatgccatctgatggttggagtaccaatagccatcctggaacttttgatgaccttgaggatagaaactccagacctttgtgatggggccatatgacaaagaaggctggataaggtaggacactctttttttttttttttttttttttttttttttgagacagggtttctctgtgtagccctggctgtcctggaacttactttgtagaccaggctggcctcgaactcagaaatccgcctgcctcggcctcctcccaagtgctgggactaaaggcgtgtgccaccatgcccagctgaacccaggacattcttaacactcaatttccacccacttctgagaaagaagtatcagtcataagaaagacttttacttaaacattttgtaaaggatttgcactatatgaaacctattaacgatatccatccaaagtatagagaaaaagacagggaaaatagtaatataataatgaccatgagagaaaaaacaaaaacactggtgtactagtgaagaatggttgtggtggcacatgcctccaatccaacacttgggaggcagagtcaggcagacctctgaattctaggtcagcttggtttacagagtgagttccaggttagccagggaaacccagtcttgagaaaacaaacaagacaaaaaacacccacaaagcaaaaaaccaaaaactaaaaaacagtaaaggaatgaaacactcaagaacccaaggccaggcgtggtggcgcacgcctttaatcacagcactcaggaggcagaggcaggcagatttctgagtttgaggccagcctggtctacaaagtgagttccaggacagccagggctataaagagaaaccctgtctcgcaaaaaccaaaaaaaaaaaaaaaaaaaaaaaaaaaagaacccaagtatgcttagtaattaacacagtatgctgatataaacattgaaaacccattcttgagatacatttgtaaatatagaaataaattgtatgcattatgtggcactttggggtcagtacttaaggtatagtttttgaatattttccaactacaccaaggtttcatgtcttatgatataatttgaaattttaaagaaatcagatctgccacttaaagcttaggaaactttaaagtatctctgaccccaagtattttaattttgaagatcttagtggtcaaaatcttgtaaaatagaaaataaaattagggtggttttgtcctataggttaaagccacagtggtagatgaaaatcagaagagacaggaactattttaaacaataaaaatggttatcaattaaatgggtttttttttccagtttaattgacagtgatattgaaagaatggtgggtcgaaaatcatccgtggagcagaataacaatagaccctataattacagtcttcgagaaaagttgccctagctgtccttagcttttcagcaggcggtttgttcttgctagaaattactagggagcgtagttgaatgtcaacaccctgaaaagggcctcagggtcaaggtagtttgcatatcttccaactcattcatttcataggcttcgaggactctgtcactgaaaccctgagggaactttcagaccctggctagagaatgagagacaaaagggctgacttctaacaaaacccccaaatagtggagaaagcacagttgggcaggacccagctagagtagattgtttggccaggccaaggggcggagctcgcggggcggagcctggcaaggggaggaaccaggaggaagaacccttggtccccagccaggtgagctcccagagctatggggcggagtctggtgaggaggcggtaccctaggggcggagtcaggagaccgtggctgaggggtggagtcaagtggtgaaaggctcgatgacggggaggagcctgaggttgggagccccaagggaatgcagttgtgggcggagccaagggggtcggagctaccggatgaggtccggacaggaggaaccagaacgaggcggggtgcggtaggctacggactcctcggaggcggagccattgggacttgagtccgcgagggtgggacggggtcaagtactgggtttagttctgcgcagaacacgcttagggactggattggaaggccgggggcggggtgggggcgaggccccggcgtccggactccgcacgctgtctgcgcaggctcattgtgccttacgctgggcagtccgttacgctaggctgctaacatggctgcctccaggtggctgcgcgcggttctactgtttctgtgtgcctcggaccttctgttgctccctcctcctaatgcctacgcggcggacactccgggcgaggccaccccacctccacggaaaaagaaggacatccgcgattacaacgatgccgacatggcgcgacttctggagcagtgggaggtctgtgtcgcctgcacacttctgagcatctcccatacagatcccttttctcctaacccttaccctctcggacatttgaccttctgacttttgtcccctgatcccgctcgctgccctctgagggtctttcttgaaatgtctcccagtacccgttgactcccgcgtctctcttcattccaccacggctcaggcctctcgcccagtgtctttcgctatcatggctcctcagccactccagtcagcacttggactctcaccagtcaagccctactttccttgctatgtcgcaggggtctctacattgatcttggtggtttgtgagccgcgaacagggagcgagcgctcctgaagagcattccctccttcctcctcctgttctggagtgaatgggttctaaaggtggtctctcaacttttttttagctttgatagagatctttccaaatatagagggtttccgacttcttttggtgtatattcctgctggggcttttgtaatttcttgggtgggtttattttactggtaaagggaactaaggcatatctcatatgcaactcaggtttttcattgatgggagtagtggacttgttttgtgagaggccgaattctggtctgttacttgattgcatttggggtatgcaaaaggttctaaggagggattcctgatcaaaagtacactgcagcccttgattgtactgtcgtatttgattggcacagctgatggaaaggaatcacacacatagctatattcactgtgtaaggttctctgccagagaacttttcagagtttgtttccaatgctgattttttttttaacttgtggctaactatattgttggaaggaggtaagacttttgggcatacatttaaaatatccacctgttggatttgacttaaaaaggggggactcctgttgttgttctctgtacccaacagaagaattggagtagtggggccatggtagtgcaaggttgtaattccagcacttaagagactagtggaggaggctagccttagttaaacctgggctacatagtaaatttcaaactggtttgggctccactgtgagattctggaaagaaaatttggagtagatttgagtgggtatgactcctttcaatttccaactgtcctttttggactctagtaaataatgccttttaacctgctaaagtgaaccttgccttgtgagaggcctagccatggacagtgctcagaccccgaggaagaggaggtcacagagatgagcaagacatctgtcagaacaagggggtaggaaataaccctcgtaaacagaaacagaaatggttggatcttataaagaggaagtgttgtgtgggaatgtcagagggcaacagggagcaggtttgattttagacaggacaggagagtattctagtctattagagagatgtgtactgagctgaacagcagagaccaacagaataacattccctgcatttaatacaaacacacttgtgaatgtggtctagtagagatctctgtgcctatatatgtacctcagcatgcatatgaaggtccaagaacaagttggatgtagttggtcatttctttccttctaccatgtgggccctggggattaaactcaggtcatcatatctgccaaggcaagcgccttgcccaccaagccaacttaccatcccctttggggattatttatttctgtctgttgtgtacgttcttccatttattagttattccatttattaactatttattgatattctactgatattctttttctttctttatgttaatatggacttagagaattataaatcctcactactattttgatgttcatattattccagatttggccctagaactgcttcaggttgttgtccatggcattctgacttgttatatgagtgattcttgctgaggcaaaaaagatatttaaggcttcactttttgttttccatagggtgactagtcttttcttcaagaaacctctgtcttaatatttttatctacccactcatccaggtacctctcaaatcaatgtgcctgcatttccagcctgtacccacagggtgctctcttcctgcttccatgtggcatttttccccaagtgaggaatctgctatagtcatccttcgcatgtgtacacttttgctccttcctaaaattcacaggtgttttcaggattgctaggacacaccactacatagaagaagtatgggggttgaacatttgcatgcagtgaattgtgggttttaaggatgcaacatgaggagtttgtttgttttgctctgctggaagcaaggactcaggaccctggggttgctagacatgacctctgtctctgataacctacactttattgaaatacagaacggagtgagtcctgggatcacagaccatcacaccgaaaggttcctttgtgttctttctcagtcagacccatctcatatcctcccagaagcaatcagtgttctaattcctgtccccccacattatttttacttgttcttgataccttaaataaatgggattgtataatatgtctttcttttatgcctggcacctgttattttaacaaaagaaaattgccttagtggtgttggcaatttacctcaaggcctcatcctgaatgacatgtactctaccactaagccatatctccaggcgtgtttgtaggtaaggtcttgctaaattgcttaagttggccttgaattctcactttctccttgagatcactgggagtcactgagagtacaaccctcagccgttatacttgtatttgagatctgttgtatgtgtatttgattttcattgctaggtagcatctataaccacaccagaatgtggctgtttttataatctaaattgagattaaattgggaataggaacattatggaaacctatgtgatgcaggacccctaagtattgtcaagggggatatccttggacattttgtttgtgtagtagtttggtggtgtgcccctgcgtctgacatcctgggcagaacctgtgcaagtgcagagagcgtctctgatgacaggttaatgctccctctctcctgacagaaagatgatgacatagaagaaggagaccttccagaacacaagagaccctcagcacctatcgacttctcaaagctagacccaggcaaacctgagagcatcttgaaaatgacaaagaaagggaagactctgatgatgtttgtcaccgtgtctgggaaccccaccgagaaggagacagaggagatcaccagcctgtggcagggtagcctgttcaacgccaactatgacgttcagaggtaaagaccccaagctatagtaggtcatttttgtgggcatttggggtttatatttgatttttcactatagctctggccatttagtccagatggcctcactcctcacacttaaaaagatcctctcacctctgcctctagcactgggattgcagctttggccacatcacctggatgtgtgctggggctgaagcagggtgtctgttttggcagtctttccaaggaccttgggcctttcctgtctatgaatccttttatttaatttttttttcttgaaacattggtttacttgtttgtttattggccaaaattagtatgtttgttttaatatcttgtcttggaaatttggcttgtcttttatctctttaacctttgcttcatcagaataaaaatggcattgcttagtctctttgaagaatgaatgagttccagttccatggttcatggtgtagctgtgctgacacatgtggttgtaacacgtggttaataaaacgaatgtgaacaagtctgtgttcaaaggccatatgatcttaaagtttgaaatctcaaaatatgaaaggttctactttatatattttatacagtatattttttatcatattcaccatcctctacccccttctaaatctgtccttcccaccctcacctccctacccatccaactgagttttggtttttcggggtttttttttatagcctattttttctgtttaacaatagttccaaaaacccaagtctttagtatcttaattgaggaagtaagaaagtgataagaaagaacggaaggagttgctaagaatgctctctgtaactcccatcagatatcttggtggtgactgttctctgatggtctgctgcttaggagcacagcatcatgccttgtgggcacgcttttatgtgtcacccagacccatgccattgctttcttcttcctgggcactaatgtatggggatacactgagtgcttgttgctgaccttggaggttaggatttctgtctgcttcccttggatctttgtgggcccttgaggaggagtcttgtaggacctgttccatgcagtggcttttagccttctcatcaaagccagtttgagacttcagaacataaaacgtggcttggcacagtgagtggcatatacctgtaaactcagcacttgggagatgaaggcaggaggatctgaagttcaaggtcatccccttaggaagtcatactgggctatgtgagaacacttagcaggaaacaaacaaaaaccatgtcttagtcagggcttctattcctggacgaaacatcatgaccaagaagcaaattggggaggaaagggtttattcagcttacacttccatactgctgttcatcaccaaggaagtcaggactggaactcaagcaggtcaggaagcaggagctgatgcagaggccatggagggatgttccatactggcttgcttcccctggcttgctcagcctgctctcttatagaacccaagactaccagcccagagatggtcccacccacaaggggacctccccccttgatcactaattgaggaaatgccttacagctggatctcatggaggcatttcctcaactgaagctcctttctctgtgataactccagctgtgtcaagttgacacaaaactagccagtacaaaccataagacatagatggaaatgacatttcatgttaaagataaaaatgggaatttctcacctctgcagcacacctgtgtcccttgcagctccctaaggagtttgtcatttataatctcttcacagcgtcatttatgtatgcttcaggaccatcaagcatctgcttctgtcttgatcttagcaggatgcttgtttagagctcagtgaacattaaagtcagcagccacttggcccaaggcagaacagttcagcatttgggtggaattgaaatgtaggcctcccagccttctctgaccccaggcacctcacttacattgctaactgctggcttctctggctaggttcatcgtgggatccgaccgcgccatcttcatgctccgggatgggagctatgcctgggagatcaaggactttttggtcagtcaagaccggtgtgctgaagtcactctagagggacagatgtatcctggcaaaggaggaggaagcaaggagaaaaataaaacaaagccagagaaggctaaaaagaaggagggagatcccaaaccacgtgcttccaaggaagacaatcgagctgggagcagaagagaagacctttagcaggtggcaagcttcccgccaggtaggcaggaccagatagcccctcgcagactggtggggcaggtggtgcaggaaactgcatagcagatgacattctcatgtcctctagaaatggtctgtgtatgaccatctggtcaatatcacagttaccgtataaaaggcttcccatgtgaaggcaggatttgtgattggtagtggactggcaagtcatgtctactgtggcttcacctgactttggaaacttgatgttttgtaccttttatttctcttgagtccatgacacccccagagtaccactccctcctcagtgcacctgctgtggtcccatggcctgttgtatctgtgtattacaagctcaagtcagacaagccttgagaagcttcaacttgactgaagcgcgggtattgattgttcagtgagtgaagataactgtgccgtatgggcagtgctgtgttcagtgagtgaagataactgtgccgtatgagcagtgctgtgttcagtgagtgaagataactgtgtcgtatgagcagtgctgtgttcagtgagtgaagataactgtgccgtatgagcagtgctgtgcgcccaggatctggacagcaaactcgttatgcagagtgggcagattcacgacagtgccgtccagaacttctcatcggttctggggaatctttgtctccccgtctcctggagttgaagagggaatgcgcttgttcatcgtgtgaggaaagaaggatgcttccactgagggcccacgttctgcatagcccaacaactataaagttggcgaggagggaccagcagagtcttgcataggagtggacctcatctacagtatttctaagcggtttcctttgatgaagtgcctaaacttgtgcttttgtatggtactctcatgatgtgctgctgttcacatctgtttctgctgttcataggttgaagcttcgctaaaagaacatttctatgaggatgccatttttaagaactcacattcttttaaaacctcagttgtggtttgaaattcgaaatagtacatgtacacgtacccggctagaaattgtcactgttaagagtgtcacagtgtgaagaattgccctaccctgctgccagtactttgtcccagtgaagctactgttggtcattggtttttcaaaaataaagtacaattaccagcttccagtgataggtatattctgtcctccagtgatgggtatattctgtcctccagttggtttccgttcatgtttctcttaccaagccacacctccctccccagctcagggcgtcctggacacaacctgctgagcctcttcaaaaagaagctttttttggtcctcgcaccttgtgacttgtgatgatctgctgctgtcctgtttgagggtgctgccaatctaggagaagctgggacagggcactcatccttttggtatctgtgggcccagcaaatctgaaacaagccccgttcctggggtttttctgttttcacatggggcagttgattggctactgtcatgtctagccatgatgctcttttctcagggctgccgtttccttctggaagccttcatgatgctgacacgggactgtcatggctttgagtgtggtgtgcagcctcttcaccaggttcatgcatcacctgtgatgtagttgtcactggtgggttctgaggacagtgcaggcatggcaggaatgactgactgtgaggagaaaggaagaaatgcataatgcagtgaactgaatgggcagagctttgttgggaggtcaagggagttccctttgcaaaggccctgaggctagaagtagtagacaagggtgctcttggaggcccctgaggagtctggactggggagtgaggactctaggaggctgttggaattttgagtgcctcagggattttgcgtagtactgacaggagagcttctccggactcaggcctttagtcagtctctcgggtttacaggcagagaggcttgaagcagccttcggttcatgctttctgctgtttctgatttctggctgtgtattctgagctgggataaacagattctcctctccaaacacttatttgctactagaaacgaaattggcacattaagcctccttttattacagttcaagaatttgaactccagattgatcgatttaccctccctgatttttgacagtccctaaactgcctcgtgttgtcacatttcttcaaattcttgggttcgagtttctaaagcacaagaagccaggaggccctactgctgctttttatgagtcaaatcaagtagaatgaaagtctattaaagtcacttgtacccagactacagattccttatagtggtactaaggaggaaaagcaggtatggtgttgaatgcctgtaatcccagtgtttgggagggagagatgggaggatcagccaggccaggttacttagttgcaggatagcctcagctacgtctgaaactcacgctccccatgctcccccccccccaaaataacccccaaaacaaaaaggactaaatgcaaaagaaactagtcacaattcttggtgtatggccttttcttcagaggagccctcttagcctcctccataaaattaccagcagggaaggctaacactgccatcattgcactgtagtctcctgttctcaggaggacggcccctgttacagcaactgcaggggcatctggacagcacaactgcttcagtccagtgtcccctgggaccactggcttctagctctctttcaagtgaggacagtctgctccttggccagccatctgtccatggggaagctacctcagggctcctgggagctccaccactggaaatcgtttctgagcagacctcatgcaagcccccctctctgaatttcctagggaatttcaaaggacttttatttgtttggggggggcggcagtgggaggagctgtgttaagtctttggaatgagtatgcagaagtttctgaaagatgctccaaagtagccctcccccaaattatatatccctaaaagtgctttaacacccaaacttacctgtaagcccaacactgaggaagcagaagcaagatcagaagttccagatcagattgtattacatgagacactcaaaatgagacgaaataagcaaaacactaccactaacaacaacagaaacaacctatgacctaggtctgaatgttggtttttcttttggcttagaacaccctatgaagaccaggctagcctcactggagatccacctgcctctgtctcttgggtattgggattaaaaggaagcccatcttacccagcctctctggacattttcatatacagtattttggtaaacttttttccattcaaagggtaagttgtttacagtataattgttaaaatttaacatttggtatatattgctaaatagctgctcctgatagttctgtcatttgagacttcccagcaggtctgtgatccttgacagccttggccatcacatgtggcatttccaacaatttaaaaacaaagcctctttaaaaaaaaaaaaaaaaaacaaaaccctatctttattctgtgcgtgtgagtgttttgcctgcatatttgtctacagtgccagatgaggaatcacattcccctagaacagcagttctctacatataggtcatgcccccttcgggtgagttgaaggactctttcccaagtgtctaagaccgtccacaaccacagctatttacattacaattcataacaagagcaaaactaacagttataaggtggcaagcaaaataatgttatgcttggggtaaccacagcctgaggagctgtattaagactgcagcatgagcaaggcggagaaccacggccccagaccagagttatgaacagttgtgaaccatcatattgggtgtgagaagctgagtccggtcctctgcaggagcagccggtgctcttaaggttgtgcgtgccacctgcacaagcatcagggagttggactgcattgtttttcaccactggcctttcatctgagcctgacgacacaagccttgccagtctgcaaattcataagccacgctttcagggaatttgtcttgtctgtctagtggtctaagaaatttgtataacatctttagactatcaactacatgatgtgtcagccttattagatgagcattttaggacttctttcatccttgagctctctggtttatgactgctctgttgtagtttttagtgtttctattggttttgtgtgtgtgcatacacacacacacacacacacacacacacacacacacacacagtcgagcatgctggagaagtgtgacttagccacttgtcaaggtgggcattgaccaagccagttcagtcagtcaatcaggtctcaagaaaagggagcaaggattgagaagaaaaagacattagacagaactatcacgtgacttgcagccagtcgtgtgctgaggcagaagcaggtttattaactgcccaccccaccccccaccccatctgcttttataccattttaagtacatgcaaataataaggtcagttctaggttaagaaacaaacaaggcaataagcacaaatagtcaaggaacaaacaaggcattaaatgaagttccatgatctctagttctaggggtttatcgggttgaccaagataaaagaaagcctcattcctgggctgagtttaccttgagctttgttttagcccaaatgtaaatattcttatctgagcctacttccctgtcctagcccaaagtcagattgtacttacttgccctggcccagggtcaaattcctgccaagtttctaaaagtggcctcaaaagctctccacagaacttgcacttgttagcattgtaatgctgaggcaaaatggcagagaaaaccagtttaaagggaggttaaccgtgcctctgtaattgcttggatcagtgttcctgggcctatggtgaggcagaatagagacaggaagggttggggttcagaactgcacttcacagatgcctcagtgacaggcccctgctagagctgcctcctggtgacactcagctatgaccttgtagactctgctgaggtttctctatacaatggctatctggcagacgctccctaaaataccaagtgccattgttgaaggtgggccctcaaggtcagtcacctatctaaagcctgtctgctgtgagtaaatccttaacacccgagccttcacagaagactctgctatccacatcttaacagaaggaatttgtgggtatcttcctgtctctccggttgctatttaacacttggaggggggtggtctgtgaggtggctcagtgaggaaagtgcttgctgtgcaaacctactggcctgtgtctgagccccagagcacacatacaacgcaaggaaagaaaggatccccagagtctgatgtctgcacacaccatggcatgtgtgcactgccgtgccatgcacacagtcaattaataaagtgcacttaaaaatcctttccgtggatactcgtgaggggtataagactggtctgaacattatgtcaacctttatgttggagggacaatgtggagcatatgacttcttcagcatccacttctacccctttggaggggtctgaggctaccctttttgttaccccatggaaggaagtggttttcctattagattctaggaagtttttcaattttaccaattttttttgcatctgtttatttgtgcagcatatgtgcgggcatgcaagtgtcttgtgaaaaggtcggagaacagacaacctgctagaattggttccctcctatgcaggtctcagggattgaactcaggtcaccaggcatggctgcaagtgtctttacgcactgagacatcttgccagctcagattctttctattatcaacattctgtcatttttttctaggaaaactcttcatgctgattttttcttaatctttaattacagatttagctctctctcctttgcttaaaaaatttggataaaacttatctttttatttgtcaatctatctgtagttttctgtacagactttgcacagcaagtttttccttagttttcaattctttttgttcgttttattttgttactttgaaacaaactcactatatagcccaggctaacctccttctgaagacctcagcccctcgaataattggtttacaagcatgtactaattatatatataatatatatgtatatatattatatatatattacatatatattctgaaatggaaatttattctttgactcagactaacctggagcttactatatagttcaggccttgaattcacggtgatccccttacttcagctttccaaattacacctttgagccgtttcatttaaaaatctagtttttcaaattaatttctccaactcagaaaaacacaagtggatactcctcatcttggcctatgattttttcctgatagggtatttgtctgtgttgagattggggacatgggtcagatagtaaagtgcttgctaggatgcacagaggcctcaaataaatccccagcatcacgtaaacgcagtgcgatgatgacacaggcttataccacaagttcatagcaggcagaggcaggcaggaggatcagaagttcaaccttgatcacaaagaaagtttgcggccagccttgagtaatgagattttgtctattaaaaaatacgtgtttatagcgtcggattgctgtggcttttttgttgttgtctcattccaaaatgtttgggtaggtgccatacctatttcttttctctttcattcatccttgaatagacacagctccccccccccccgccaaccccccactttgagccttctccagccttctcagtcagttctcctggacctctctccctcccttcctctgagctgggaagatatgatctagtgctagatgctgcttcctcaaaactgatcggtgagaacagaaaagttcacaggactttgagcttggcctggtttggcaggtggccttggccttatgtgttttcgggaagtagcttagactacggtcttcctccaaggttggggagaagcagtctggacttaagagcttccctcccctgtagctgtgagcctgggcctctttgttgggaaaggatgcttgttctctgctttacttatctgtctttccagaaaccattttcacttccacatcctgcaaaaggaaagacttcataatgtgtggcttttgggggtgcagatgggtgcagggtggcttaattggcaaagtaatcacaagcacaaggacctgagtttgttccctaaaacctacttgaaaatgccaggtgtgaaggaatccccttgtaatcccagcgtgcggaggcagagacgggagactcctcgggtagccagtgtagtctaatcggtggtgagcctcccaccaatgagggaccctatctccaaggcaaagtggtagacagtattcctgaagatgacacttctgacttatacacacatggacattcacatggagaaaaaaaattgtgtgtgtgtgtgttgacgtcaagaaataaagtacttgccatgggtacataacttaaggttgtcacaaattcagtaattagaataaaaatttaatacagaagtttgaaaagtaacattaaaaagattttgatgagataaataaacattttaataaagagcagtgtctgagtaaggatttctattgctgagatgaaacaccatgaccaatagcaagttggggaggaaaaggctcatatggcttacacttccacatcatagtccattgaaggaagactggaccggaactcaaacagggcaggaccctggaggcaggagctgattcagaggccatggaggggtgctgcatactggcctgctccccatgtcttactcaggccattttcttatagaaccctggactatcagcctggggtggccccaccacaatgggctgggctgggtcctccaccatcaagcactatttaagaaaatgctctacagatggatccaatggaggtggggttttccctaattttttattcactttatattctggtcatagtccccattctctcctctcctcccagtccatctcttccaaatccctctcccccactgcccctccccttctcagagaagggagactcttcctcccccttaggtatcacccccgccatggggtatgtagttcgagcaggactaagcacctcttcttctcctactgaggccccaccaagcagtccaggtgggggaaaggggatccaatgacacggaacagagactgagacacaccccttctccatttgttagggggtccacatgaagaccaagctgcacatttgctacaaatgtgtatgggtctaggtccaggctctgtgaaccctcattgtcccaagttagttgactctgtgggtcttcttgtggtgtcctttacccctctggcttgctcacttctatccctgcctcttccacaagatgcccagagttctgcctgatgtctggctgtgggtctctgcatctacctccatctgttgctgcatgaagcctctcaggagacatttatgctaggctccagtctgcaagcatagcagagtatcatttacagtgtcaggggttggctctctcacatgagatgggtcttttttcttcttctttttttgtttttttttccgagacagggtttctctgtagaaacatagccctggctgtcctggaactcactctagaccaggctggccttgaactcagaaatctgcctgcctctgcctccaaagtgctgggattaaaggcgtatgccaccactgcccagcctttaaacagattcttaaggaggctagagagatggctcggtgaggaagaacacttgttgcctttccagaggatgtaggtcaatccccagcacccacataatgcttacaaccatcaaaaactccaagtctaggggagatgacatcctttctagcttttatggacacgaggcatgcaagtggtgctcatacatgcaggcaaaactaaaacacactaaaataaaataaattgaaaagattaaaaactataatttgtgttatacataatacagtttacatggtatttatttatttacttttttatttatctctatgacagggtttctctggctgttgtgtaactggctctggagactagactggcctcaaacccagagatccacctgcctctacctctggaatgatgagggttaaaggcatgtgccaccatgacccagcaacagtttattacgcgttaaataacactatagtagaatcatttgatgacattttaaaggatttgtttgtttgattgttttttgagacagagtttctctgtatagctcttgctgtcctggaactcactttgtagaccaggctggcctcaaactcagaaatccgcctgcctctgcctcccgagtgctgggattaaaggcgagcaccaccatgcccagcagaattattattttttttcttttatgtatatgtgcatttgtatgcacatcccccagagtccagaaggagacaccaaaggagacactcagagctggagttaaaggcaattgtgagcttgggtgggaggaacccagttcagtgctggtcttcttcaagagcaagatcactatgttctctgagattatcctcctgtaacaggatctctctctctctctctctctctctctctctctctctctctctctctctctctctctctctccctctctccctccctccctccctccctccctccctccctccttccttcctttctttctttctctctttctttcttatttatttctgagacagggtctcggtacatagacctgtctggcctggaaggttctatgtagaccagaccttcagtgtgctgggattaaaggtgtgttctaccacactggcttcatatagttttaaatagaagaaaaaatggagaaattttcaagttacaaaatccctccccacaaaacacattaaaaaaaaaatccctctttctaagtaggccagtgtaacacatggaggcagtaagcagtcatgcctgcttcctgatgcgtggtcaatggagtccgagagcttggcctcaaaggaaggagacatgttggattttcctggaatgccaaaatggttcttgctgattccttgagacaaaacttcacatttgctgaattcccaggttttttagaataagaaccgaaatcttgatttgttttgttttgttttgtttgtttttgaaacagggtcttgttatgtgtccataccacacctatctgaaaccttgatttttactgggataatcacaaagcaaattgtggtacctcttgcttgtactgcctgaggtgtgagaatcactgcaaattcaaggctggcccaaactcaaataaataaataaataaataaataagtcacaacaacagtaaaaaactatataaaagaacaacttgggctgagttgatgtctcaacaggtgaaagtgtttggtgaaaatctgaaaaacagcaaaccaaaccaaataaccaaccacacaaacaaacaaacaaacaaagaaaactgagtttcatctctggttcccacagtagaaagacaggaccagctcctcaaaaatgtttgttaacctctgcatgttatggtacttatgtgtgtgtgtccgtgtgtccgtgtgtgtgtgtgtgtgtgcgtgtgcgtgtgtgtgtgtgtgcgtgtgcgtgtgcgtgtgtgtgtttgtgtgtgtgtgtgtgtgtgtgtgtatctgtgtgtgtgtgtgtgtgtgtgtgtgtgtgtgtctgtgtctgtgtgtgtatgcatgccatcacacagtaataataaacaaggtaagaacaggggatcaaagactctggctatgatggtgaacagctgtaatccatcacttgggagatgaagacagaaaacccagcaagtccaagtcattgccagcaacagagggggatcaagtcagttctggaatccataagattccacctcaaaatacaacaagaacttccttttccaagacatatttctcacttgataaagattgggggggcaattatctctgaccattattttcagattgatgtcattatcatcaccgaggaaatagagtttcatttgtcttgtttccatctccctgcctaggatttatgcttggcagcctagtggttatagcctctctgtccttgtactgtaccataaagagccagatatgactccagggaagactctgcagaagcgtttgagtcagatcaatcctgtctctgggattatcctcctgtaacaggaccccagaccttagcacacccctctctatgatggaagtacctttcaggctgtaaaactcagctcgtagacagcaccacctgccaaaatgagaacaaagacctaatccatcaaagtccatggtgctgggaaagtctctacatggactcaccttgctttttggcttctgtagttctgcttctggctaactgttcttgttaactgaagtatgtcaacccaggatatagtttttgtgcgtaaacagtcaccctgaggcctagcttctttgcctgtgatcataatggtcagataccttctcctgcttcagccttcggttccatctcatgaaaccagcatcgttgtagcctctgagaaccctatctgcatcctgagctccatacatctgtgagaaggtaaggtttgcctagagtccctctgggtttcagccaccaacaacccagggactgcaaccttcccttcccagcccttctccctcctatttttttgtacatactaaattgtatctcactgggtaaaactcttcaaattatttgtttaaatttataagtttgacttttaaaaaagtctattgttaaaaaccaaccaaacaaacaaacaaaacctcaccctgaagaaaggcttaaggctacactgggattctgaacacccagggtagttactggcaggctaataaagacttctgttgtcttaaacttaggtctgagtaatctcgggtggataccccaaagcattcacctgtctgtccctttatagaacttgtgctgcagcccaaggttccagccatcctgccagccttggtcgggatgcatttgctggatggtcgtggagaccagagatgaacacctgacccctggggtgtcctcatgtggggttggccagtcaatcctcctcagccagggactgattcaatagctcagttgtgactggtcagctatggaaggcccagagacttttgttgggcaggcttctagcctggcctgggttggatgttgccattacattctaagagttcaagatctacaagggcaggtttggagaagtttttgcatttctgatttctacagagtggacccataaatccaggtgatcagcaggatcaggccatattgtcaactcagtaaaaacaaaaatccccacatagttattgatcacttatgtgccaggcaacaatgttaacttaacttgtaagccttaatgagtgagatttcctgtccactgtgttgctgccaaccaaaccacctagatttgatccctagaacctacctgatggaaagaaagaacggactcctgccagcctctgttttcacatgcctgccacgatgcatgcacacgctcccttcaccacacagtaaatgtaaaaaaatatttatagctgggtgtggtggcacataccctttaactcagtgctctagagacagaagcaggcaagatcattgtgagtttgaggctagcctagtctacaacctgagttccagttacacaaagaaactgtgtcacaaaaacaaaaacaaaaacaacaaacaaacaaacaaacaaaacccccaaagaaacaaaaagaacaaaatacaatttttaattttaaaaaccagtctttcctatgaaataatttacttttatctttcttcctctattcttgggtgtgtgtgtgtgtgtgtgtgtgtgtgtgtgtgtttgtggggaggttgtttgttttcagacagaatctcattatacgcctatatttttgtttttggtgggggttgttttggttttttgttttgttttggtttggtttggttttttggctttttcgagacagggtttctctgcatagttctggctgtcttggaactcactctgtagaccaggctgtcctcgaactcagaaatccacctgcctctgcctcccaagtgcgtgcgccaccaccgcccagcttgtagttttgtttttgaggcaggggattagctttggctaacctggagcttactttgtaaactaggctagctaacattgctaacagcatgcatgaattggtccatcttacattgcatggttgagctctatttgtcaggactccataaagagaaatgcaccaaaaacacttgtggtggtatgctgcagtttcttgctgtttcctcagactctggctgattggcagagtgatgtcagctgagacagatttatatactgaggcaagaccagtggaggacacaagatgtttggcaggagtataaaaaggacttgacagtgatggaggctgagcttggcttgcttatagagctagctgaacaactcttgttggtcttgagtcttcactgagcttcactttgctgagagaggcacagtggagaacttttcctggccttactccctggtccatctggctgacttgtgccaagtctgaggcctggctatctctgcaaggtaatgccactgctgcttatttatgtttggtatcccaactctaccaaactggaccgctggtctatctgtgaagtgcttgtgagtagatcaagctgccactgctgacctgtgaaccactgatttccagacaacacagatgggggttgctccaaagaaccttttctaaacaggtccacttcctctacccatcctttctttttcactacctctgctgggtggtgggctaaaagggaagttagagcatccaagaaccatcattgaaagtaagccttgaaaaagtcaacgttacaatgatctgaatgagattcccttatatttgggtatttgaatattggttcagctggtggcactgagtaggttcaggagatgtggccttgctggaggaagcccatcactggaatcaggctccaaggtttcaaaagccgtacgccatttgtagtacattctctctgcttcctgtttgtggttcaagatgtgaactctgctgttgctccagccacctgccacctgcttcctccactccatccccacagactattaaccctttggaactgtaaggcaaataaactctttcttctatacattgccttgttcctgctgttttcttgcagcaacagaaaagtaattatcatgcacagagctctgggtttgagccctagcactgtagaaggagtggtgtcacatgcttataatcccagcatgcaggaagtagagacagaaagtttaaggtcatcttcagctgctcagagatttcaaagccaaatgacagtatctgagctctgtctcaagaaaagaaaagaaaagaaaagaaaagaaagaaaagaaaagaaaagaaaagaaagaaaagaaaagaaaagaaaagaaaagaggggaggggaggggaggggggaagggagggtagggtagggtaggggagaggggaggagggggagaggagaggaggggggggagagagagagggagagagggagggagaggcagagggagagggagaggcagagggagagggagagggagagggagagggagagggagagggagagggagagggagagggagagggagagggagagggagaggagagggagagggagagagcctttactgaccctgtgatgagagaaagggctcacttgagaatgcagtgaagacagctggaggtttatagccaagggcagagtgtacagctttgagcagcaatggttaagagggatttgattatctatcaaggaagagggattcttgttaaactggtttatgactcaagtttgattttgtttttgagactagacattgctttgtctttctcttttttttagatttatttattattatatctaactacactgtagctgtcttcacacacaccagaagaagccatcaagatctcattgcaattggttgtgaaccaccatgtggttgctgggatttgaactcaggaccttcagaagagcagtcagtgctcttaattgctgagccatctctccagccccgagaccagacatcgctgtgtaatccaggctgggtttgaacttgaaatcccctggcctcgccccccccaaatgctggggttataggtgtggatcaccatggttggcttctgactggaggtttgcaggaagcaggggacctttcttttctctggcatgatgcaatgtgcatagtccttcttgtactcaggcatcagctcttgactgtgagacctgatggtaaaataggaccccatgaggagtatggaaggtttggaagatttaaatcctttctgatggaatctgaaagagattcacctccttgatcaaacataagtcaggctccttcaagcccactaggccccagcccttagcattcatctatggcaaacttatatctcccagtttggcaagaatcctgtcaagtcagttctcctcgcatcccatacccttgatatcacacttcatatagatatgggtcaaatgtgaagtgtctcttcggttgtgtgttaaagcatagtccccagctggtagcactattttggaaatatttggaatgttctggaaaatttagaagatggggtccagttggaggaagctcacttagaggcgtgcctttgaaggctctctctggtccccaaccccttcctctctggttccgttcctacgaacagctttcttcacttgcttatactgccgcagcactgtgccttagtgcatgggaccaagcaataagggcttgaagctctgaggaagacaaactgcttaaactgttttatgtcctgcattctgtcacagtgaagagaaacaagagagatagaatgtctgatgttttcactccttaccacttctgacatgatgttttagcaaggacccagtgagccagtttggccaggaccccctcacacttggcagtatctgctatctgctgtcttcatcccccgactctaccctgcctcagctataaattccagtgctcagaacgctcttctgttgcaagagatcccgattaaaacctggttttattatcttcctattatcagactgtgcagcatctgagaggaaaaggccctgaagaactgggaatgctgagtcagctttccagaagttctgttgtagagcggtgcacagcagcgagcatagctaggtttttagagataatgcgcattctcacaacagctctgcaggtaagatgtggcagcttatttacagggtagtgggttgaggcagaaagggacctgcccggtgatgttaacgggtagtgagtgcctcgtcaccttctcaagactcaatcagaggaggtggagcacacctgacgtccatgcgcttgagagtctgaaaccatagaattgtggggtcaaggccatttgaaatctcatttcaagagagagagagagagagagagagagagagagagagagagaaggaaagaaaggaaaggaaagcagagaagagaagagaagagaagagaagagaagagaagagaagagaagagaagagaagagaagagaagagaagagaagagaagagaagagaagagaagagaagaagagaaaagaaggctagagtctcttctgtatagtcctgaaaaaacaagacagtcctttgctctcaggatagccttcccatttgaggaatcgatttgaaatctgagtggttcccactagggggcagcagagaccggttgtgccttgctgtttctccagctctttggggttttttcactgaggtcctctggtaagaattcttcagttattactcagtcaaactcgtgttttgtgaaaatacacccctgtaactcaatttatctttgaaatataagtgatcatttgacccctatgcatcctttaacatgacctatattaatttaggttagagagactgtttggtgagcaaagaaaccctgcacaccaagcctcataacctgagtttgacctcaacattcactaggtggaaggagaggaccaactactaaaacttgactttgaccgtggcatgtgagcacctaatatactaaataacttatatcaccctcagcagccctatgtgataatgatatatatgttactttacacagagagaagccacagtccagagaagcagccaatttcccaaagtccaaccacaaagcaaagacaaaggtgaggtttgaactcatgtgtttggattctgaagtctgccctagttccctcaatttgcctctgggtcttgttccatgggcctctctgcagacccacctgcttgcagttccaaacactcttttctctcttaaaattttttattatttaaatgcatttaaacattaaacatattaataatattgaatattttgagaatcaaataatacataaaatttgttaaacttttatattcatatccttttacatcctaaaaatatcattaatgaacatttaatactacccataacagaggatcctatatctaatgttgaatactaaattgtttcaaaacacacaaaatattctttgggaatttttttttctgtttttcttattttctttctttctttctttcttttttttgttcttttttaattagatattttctttttttatattttaaatgtttgggaatttttttctgtttttcttattttctttctttcttttttttttgttcttttttttattagatattttctttatttatattttaaatgttatcccctttcctagtttctcctctgaaaatcccctatcctctcccctctccccctgctcaccaacccaactacttccaattcctggcccaggcattcccctatactggggcatagaaccttcacaggaccaagggcctcttcttccattgatgaccaactaggccattctctgctacatatgcaggtagagccatgagtctctccatgtgttttctttgattggtggtttagtcccagggagatctggggctactggttagttcatattgctgttcctcctagggggctgcaaaccccttcagctccttgggtactttctcttgctcctttataggggaccctgtattagtcaggtactggcagagcctctcaggcgacagctatatcaggctcctgtcagcaagttcttgttggcatctgcaatagtgtttgggtttggtggttgtttatgagatggatccccaggtggggcagtttctggatggtcattccttcagtctttgctccgaactttgtctctgtaactcctttctttgggaattaaacataataaaggagcataaaatattaaaaaggaatcatgaagaaatatattcaaaagcccttatatgaaacaacctgacacagtgagagaatgtttaaggcacattttatatctgtgtgcattgtctaactataagtttacttttaaaagattatcagtgagcagaattctttcaatctggaattttctgtgacttccagaccttacaggtgatgtgacaagttgtgtgttattacacactcgttagaaaaatgctgcacttgggctccttggtctctttcctcaaaaggccttaaaaaccagtcacagactatggagatttcagcctaatggcttagcctagtctcttccctaaagtttcacctctatacagcatttttttctccctcttcctgtttcttgagacagggtcgcactgcattgcccagcttgattcaagcttgtgaactcatgtttctacctcctgtcgtgacttcccatgtggccaggactattagacacttgatactttatatatagaaatatttcctacaaagcagtaagagttaagaaagaaagaaagaaagaaagaaagaaagaaagaaagaaagaaagaaagaaagaaagaaagaggggactggagagatggctcagtggttaagagcaccaattgctcttccagaggtcttgagttcaattcccgcaaccacatggtgactcacaactatctgtaatgagatctgatgccctcttctggtgtgtctgaaaagagcaatggtgtacataaaataaataaataaatcttttttaaaaaaggaagaaagaaaaacaaacaaaccactaaaattatcagaagtggccagtttacataagggcaaatgtgttaaaattccatgtgtgtccgtgtcttctgtagttataagatatcattggaaagaacagtgaggtgcatctattaaactattaaacaagtgggttgtaaaaagaactagaaagtaaatactttgaaagaaataaaaaagaactcgaccctcctggacagcggtgttagaagaattacttggagcaacttttctgcagagccgttcagcgttgtagaagaagagcatcaacaagcatgcagattgtggctccaaagaacatgcatcagtgataccaaggacttatgaaaagaacacgtggtgcagtgttttattttatttatggtggtcatgcacatcgtgaaataggccagtgatcagagactggttaaatcagcacccctcccagctgaagagtcaagtgaccattgagatattggtgactattaaagctaacccatcagccatggtgattcacaatattttttctagttctattaactttattatttttctttacttttaaaatattttaaaatttatttattcaccttacatctcaatatcagccccagctctcctcccagtgctctctcacacagatcctccccacattcccctctctcctcctttgagaagggaagcccccctccattactcccaccctcacccaccctctctccctccctccttcccctcacatcaagtccttgcaggactaggcatatcctctcccactaataccagacaagacagccccattaggggaacaggatccacagcaggcaagagcttccggaacagcccctgctcgaattgttggggaaccagcatgaaaaccaagctgcagatctgttgaatatgtgtctaggtttgttaactctgctggtcttcctgtggagtccctgtcctctttgggtcccccaaaccttcccccagctcttccataagtctctccgagctccatctaatgtttgggtgtaggtttctgcaactcttttcattagctgttgtgtggagcctctcagaagacagttatgctaggctcctatctgcaagcctaaaaagtgtcattaatgatgtcagggttggttcttgcccatggaatgggtctcagtttggagcagtcattaattggccattccctctgtctctgttctttgtcttcaaacatcttgtagacaggacgaattttgggtggaagatttcttttgtgggtgggttgctgtccttatccttccattgagagtcctgcctgtctacaggaagtagccacttcaggattcatatcccccactgccaggagtttcagctagagttttccccataggcaccttggggcctcccctcattccaggtctctggtaaattctagagatgcctctaccccactgccctttgcagatttccattttctctcccctgctctctgtttcctggtccctccccacttctctctccatcccctctcctacctagttccctccatccattcacctctgatatctattttatttccccttctgagaaaaactcaaccatccttctttgggccctccttgtgatttggcttcttggtgtgtgtgtgtggggggggggggtaggtctgtggattgtagtgactcatgatattttttatgtattcatttaaagtgtttccaagacaaaagtctttgaaaagtagaaatagcccatttagattgaatttaccattataaaccaatgtctagaaaacagtctttttctttgccctcctaattacttatctgggaatttatcccaaggtaatatagcttaggtccaaagatgtgcactgcctcagatatttcatggtacactaaggagttgagtagaattctggggtaggagaaggggtatggggacagtcagagcaacaggcattcagagcattcatctcctacctgggatatacattttaactcatgtcctctgtgcatttattttcagcattatttagtttcaataatttgacatagttgtgtcacccagttttttaaataagtaaattgtttacaaactatggatagatgtttgtcagcatgtggatatgtgcattctggagctggagttacagcagttctgagctgcctaacatgggtgctggggcccaaactcaaggcccctggaggaagatcagcaagtgttcttaaccacggagtcacctctttagttctgtatcagctagtcttagtcttaatgatatgcaccattgatactgtgtttaggagggcattccctatctgtattagtcaggatctctaaggaactaaactaaacacagacacagacacagacacagacacagacacagacacacacacacacacacacacacacacacacacacacacacacacgtctagtggactgaacaaccactagtatgagcatgttacatactagttgttcagtccacaagaccagatgtctcagaagttctaatctggtgctgaaattccagagaggtctagaaagatgccagttttcactctacattggaatccccaagaactcagttataacaccaatgaaagaatgagtcgggagagatgccggtgagagtgaggacaagagctagagcatgcagcttccttcttccccgtccttctatgtggaatacccacagaaggtgtggtccagatttagggtggatcctttggagtcaagtgatccagatttagggtatgtcttccacctcacataatccaaccaagaaaattcctgcacaagtgtgcccagctgcttgggtttttagttaattccttgtatagtcaaggaattgtataactaagattagccattgctctaccccagaagttatcactcaactaaatatagagtacttcactttagaagatggagaaaagccaatctatgtagaagatgcacctagagcgtggtatggtggtgcatgcctgtaatcccagcacttggagggtagaggcaggaggatccggggctcaaggttatccttagctacatactgagtttacagctagcccaggctatatgcaaacccaaaccaaactaacacacatacacaaacagaatcccatccatatctgagacttagttctttcctagtgtgaattcttgcagtcccctgcagtttgtgtggtctcttggctgcacgggctgatctgataggcacaggaagtcattgccagttttcgtaagctgttttcaagcacacctctgttaactcaagctttcttggtgactggccagctagtaccagcttgtaaacacctgttaagcaagggctttgcaatctggctgttcagccactattaacttgtgcttcctatggtagatggatttactatgtggaaacagaagtggtacgaccagggcttccttctgcccatccatctctcctgctctctacttccctagccttctggccacccacaggagaatgaggccgactcttctctattgctttcctcctctgctcccgtgtcctctattgttgatggtctaggcacaaagggaagaatgaaggaatggcttagaaagtcttctattgtacgtgctgtaaagtgcttctgagtgtccagtgttgtggcaagggttgtgtcaactcgctggcatctagacttatttagatttagaccattgtgagatatcccttactaactgcgatctcagccaagattttccagtcaaaatactggtggaaccccttcctcctgcaacttctgcctttggaggatccccaggcattttgagacagggatccccctttgagagccttcagtcatctgcatgtaactcctccagctttgtacacgatgtagctagacttgcttccacctgggtgcagggctcataggattccttactccccctgcctgccaaaaggcagaagtgtgttctctagaggttgacctttgtcattccctgctccaaggggagctctcacctctgcctggtttggacaccctagtggaggcaccttatagatctccactacccaaggcagcaggcgggtgtgatgggcttccagttttctcttcacatacccactatcctccagaccagtaagctcaaggatttatatgtatgtgtgtatgtacaaatgtgtacatgtatacatatgtgcatgtatgtatgtgtatatataagtataattgcagcatgtcctgtgggcatgtttgtgctacatttgctgtgtgtatgtatacatgtgtgtgtatctacacacacagtacataggaggtatggaatttcttgcaattacagaagattaatcacagagaggtaagagtggtctctcaaagctaatatgataactaacattcatagtaataatccagtagcaggcaaatcatttaattccctttccagttgtctccagctctttgttgacaaggcagctgtttttgtgctattggggctgctgctggggttgtatctcttctgaccactgcccccatgccatgaggtcatctgtagtttctcctggtgacttttctgttccctttctgagcagactggattttgtttgcttttatcttctgcagtggttgaggaaggagacgtcttattctgagtaggactaattatcatcattagtttttgtttgtgttcttaaccctgtaattacagaccgatcaatgtctaggacaacatactggagttttcctcccacagggaagtgggaggatctcacagcctctcctacctgctccctcccctgcctctgcccatcgggagtgtgttacagaaacccagccttcctctctgaagactcttattagttcctggttttcctggccttgccccaggctgggctgatgatagctgtaaagctt

SEQ ID NO: 68 - DNA, 3189 bp, Rattus norvegicus
ttcagaatcactacttgaagcttcagatcccttctctacaatgaacctcagcactgcaaaccaccacatacccctaaatgatggtaacagcattccgatcatcgggcttggaacctactcagaccctagaccggtacctggcaagacctttatagcagtgaagacagctattgacgaggggtaccggcatattgatggggcctacgtctaccgaaatgaacatgaagtcggtgaggccatcagagaaaaggtggcagaagggaaggtaaagagggaagagattttctactgtggaaagttatggagtacagaccatgatccagagatggtccgcccagccctggaaaggaccctgcagaccctcaagctagattacatagacctttatatcattgagatgcccatggcctttaagcctggagaggaattttatcctaaagatgagaatggccgagtgatataccacaaatcaaatctgtgtgccacgtgggaggcactggaagcttgcaaagacgctggcttggtgaaatcccttggggtgtctaattttaaccgcaggcagctggaggtcatcttgaacaagccaggactcaagtacaagcctgtcaccaaccaggtggagtgccacccgtatttcacccagacaaaactccttgaagtttctgccagcagcatgacatcgttcattgtcgcatacagccccttagggacctgtcgcaacccgttatgggtgaatgtatcttctccacccttgttaaaggatgaactcctaacctcgctggggaaaaagtacaataagacacaagctcaaattgtgttgcgtttcgacatccagcgagggttggttgtcatccctaaaagtactacccctgaaaggatcaaagaaaactttcagatctttgacttctctctcaccaaagaagaaatgaaggacattgaagccttgaataaaaacgtgcgctttgtggagatgctcatgtggagtgatcatcctgaatacccatttcatgacgaatactgaacatggaaatttcttcagtggagttttttttttgtctttcattcgggatcttgagctgattaatcccctccagtcgtagaaataaatggggtcttgctatcttcagattaagttgagcagaatacaccatgcttaacttgtgtatagtattaattcaacttagctctgatgaagagaagatttaaatatatctaaatagtttgttggaaaatgctttactagtatctttagctcaatgtgttctagattgttgatggaaattaccgaactttaattcaaaaataacaaaatatataaaatacaagatacaatataaaatataaaatacaaaaatataaaaacaggttctaacccaggagtctgagactaccatagggagtttgatttgtttagcatttagcaggacaacaaaagaggttggcatgcttccaggtgctgaccataaccatgacccaaacaaggtcatggacacaagatggacacagccaagacacaaatccacataccaatattaatgcaccttgagtatagacagaactgaaagtctagaaagtctaaagaagaacataaagcaggatgtcccggggctagaggttctcactggaggacttgcctggcagactggagacccagggtgagggtgtgggtgaggactatcagcaaagccataacgattctgtttttaccctttgtttccatccagtgtgcccattcagcttttaatgtgcttgaaggacagacagttaccgattccttcttaaattgtttttgttcagggcagtggggaattgagacagggtctcaggtagtctgctcatgtagctgcttacaaacttgctgtgcagctgagaccagttttgaattctgaacccctggtctctcttccatttttcatggcctgagcttccacctgactggtaagtccccacttgtactgtgctgtaatcattcttgcccacttcatcaaggaaaccaccatgtaaagtggcaagaaacaatcaatatatacaaccaagatttgtatacaatatggtctgaagatggtgatttttaaaagaatgatatttaaatagccatttctttctttctttctgaatctttaaaaattattttatttatgtgcattggtgttagctgcatgtgtatctatgaggaattgtttgaactcatggaactggagttacagacagtggtgagctgtaggtaggtgctgggaattgaacccaagtcattgggaagagctgcaagtgctcttaactgctgagccatctccccagcccccaaatgaatttgggaaatactagaagataaagctttgtaaagtagtttttaagatcttaagaatatttgaggtacgtatctgaattttgacaaagctgcaagttcttttttttaaattggatttttaaaaatttatttacatttcaaatgttatcccctctcctgggttcccatccacagacctccctatctcatcccccctctcccttcttctatgagagtgttcacccacctacccactccttccctcctccctgccctgacattcccctacactagggggtcgagtcttggcaggaccaagggcctctcctcccattggtgcccaacaaggccatcctctgctacataggcagctggagccatgggtctgtccatgtgtctctctggatggtggtttagtccctgggagctctggttggttggttctgttgttatggggttgcaaacccttcagctcctttaatcctttctctaattcctccattggggaccctgttctcagttctatggttggctgtgagcatccacctgtgtatttgtcatgctctggcagagcctctcaggagaatcaggctcctgtcagcagagcacaagtaattttagcgtatataaatttttaaaaagtgataaatgattacaactgtatctatttttaattcatctgaaatacagtacatttgtttatattagatcacttccaaagggtgagagatctctaatatatttaattcatagagaatcaatggccgaagagaataagttttgagaattatcacttaaaaatgtgatcaacatgaaccatttttgttcaatactgttcaatattgttaacaatgctgttctctggaaaatattttattcacatgaattaataaaatataatg

SEQ ID NO: 69 - DNA, 2304 bp, Rattus norvegicus
cagaagacccaagacctgcttggttgcatgagtaacaagcgatggattccatatctctgcgtgtagcactaaatgatggtaacttcattcctgtactggggtttggaaccactgtgcctgagaaggttgctaaggatgaagttatcaaggctactaaaatagctatagataatggattccgccattttgactctgcttatttgtacgaagtagaagaggaagtgggccaagccattagaagcaagattgaagacggcactgtgaagagagaagatatattctatacttcaaagctttggagcactttccatagaccagagctggtccgaacttgcttggaaaagacactgaaaagcactcaactggactatgtggatctttatattattcatttcccaatggctttgcagcctggagatatatttttcccacgagatgagcatggaaaactattgtttgaaacagtggatatctgtgacacatgggaggccatggagaagtgtaaggatgcaggattggccaagtctattggggtgtccaactttaactgcaggcagctggagaggattctgaataagccagggctcaaatacaagcctgtgtgcaaccaggtggaatgtcacctttatctcaaccagagcaaaatgctggactattgtaagtcaaaagacatcattctggtttcctactgcacgctgggaagttcacgagacaaaacatgggtggatcagaaaagtccagttctcctagatgatccagttctttgtgccatagcaaagaagtacaagcaaaccccagccctagttgcccttcgctaccagctgcagcgtggggttgtgcccctgatcaggagtttcaacgcgaagcggatcaaagagctaacacaggtttttgaattccagttggcttcagaggacatgaaagccctggatggcttgaacagaaatttcagatacaacaatgcaaaatattttgatgaccatcccaatcatccatttactgatgaatagtaacatggtggactttgtcagcatttctatcggaagatctgtttatgcattgtgatttgaaagatatcttggatactggtgactgaatgcatcagaccactgtttctgttaattcacagtcagctggagcaatgtccacagtgctatgagggaagccatgtttttgtcacactctgaaatggaacatcacgttgcttttccttgtgtttttaaatattcatttattttgctttccatatatgaatattttccctacatgtatgtgtatctcatgaatgtctatgtccatgcagggttgaagagtgttgcaggtcacttggaaccggagttacattgattatggagttaccatgtgggtgctgggagccaaacctaggtcttctgtgagactagcaagtgcctttgaatgctgagccatctcattaggtccaaccctaaagatccttgcctgccactatttctgtgatctcaatgttttgttttctcctgacttctgacaccaagctgatttgctagaagtcttgggcatgaagtgggtgttgaggacagttattgcaaagggatttctgggtgggagttgaaagaacgttcaacattcagggaattaattgttcgaggttattgattagtcaatattccccatattctttgaggaagaagaaagtactccatagattttccctttttcttagttttgaggtagggcacctgtggcaggagtgaccaagagacccagggttctctccaacagcccaagaaccagagctccaagaacctggagagcaagttcttgtgggaaggttggaatgttggtaagaagagaaccaatttaaaagcatcatcatgattcagatgtggggagtttgagaggaaatttgaatgtgtctctctttttgggaaatatatcatcttttttctttttgtaattacatgttgggagcaatgcccttgaaaccctccattattgatgttatggttagaattaagtatgactgggttcatggaaaatccccagccagctgcagaagactaatacaaatctggtggtcaggatgaataatgatatgataaagttctgaccttgctgagaaatacatctgacatcaagatacccaatgtgatgacctgtaagctttctgaaaaaccaacatcctgttgacatcagctgactacatgtatactgtgcccttggcctgtgtaaatgtttcacacttcccccctccctctgttacccatgttatggtataaattcagccttggtaaaaaataaaattgtctccttgatcagaaaaaa

SEQ ID NO: 70 - DNA, 5043 bp, Mus musculus
atggaaacggcgccgacccgggcccctccgccgccgccgccgccgctgctgctgctggtgctgtactgcagcttggtccccgccgcggcctcaccgctcctgttgtttgccaaccgccgggatgtgcggctagtggatgccggcggagtgaagctggagtccaccattgtggccagtggcctggaggatgcagctgctgtagacttccagttctccaagggtgctgtgtactggacagatgtgagcgaggaggccatcaaacagacctacctgaaccagactggagctgctgcacagaacattgtcatctcgggcctcgtgtcacctgatggcctggcctgtgactgggttggcaagaagctgtactggacggactccgagaccaaccgcattgaggttgccaacctcaatgggacgtcccgtaaggttctcttctggcaggacctggaccagccaagggccattgccctggatcctgcacatgggtacatgtactggactgactggggggaagcaccccggatcgagcgggcagggatggatggcagtacccggaagatcattgtagactccgacatttactggcccaatgggctgaccatcgacctggaggaacagaagctgtactgggccgatgccaagctcagcttcatccaccatgccaacctggacggctccttccggcagaaggtggtggagggcagcctcactcacccttttgccctgacactctctggggacacactctactggacagactggcagacccgctccatccacgcctgcaacaagtggacaggggagcagaggaaggagatccttagtgctctgtactcacccatggacatccaagtgctgagccaggagcggcagcctcccttccacacaccatgcgaggaggacaacggtggctgttcccacctgtgcctgctgtccccgagggagcctttctactcctgtgcctgccccactggtgtgcagttgcaggacaatggcaagacgtgcaagacaggggctgaggaagtgctgctgctggctcggaggacagacctgaggaggatctctctggacacccctgacttcacagacatagtgctgcaggtgggcgacatccggcatgccattgccattgactacgatcccctggagggctacgtgtactggaccgatgatgaggtgcgggctatccgcagggcgtacctagatggctcaggtgcgcagacacttgtgaacactgagatcaatgaccccgatggcattgctgtggactgggtcgcccggaacctctactggacagatacaggcactgacagaattgaggtgactcgcctcaacggcacctcccgaaagatcctggtatctgaggacctggacgaaccgcgagccattgtgttgcaccctgtgatgggcctcatgtactggacagactggggggagaaccccaaaatcgaatgcgccaacctagatgggagagatcggcatgtcctggtgaacacctcccttgggtggcccaatggactggccctggacctgcaggagggcaagctgtactggggggatgccaaaactgataaaatcgaggtgatcaacatagacgggacaaagcggaagaccctgcttgaggacaagctcccacacatttttgggttcacactgctgggggacttcatctactggaccgactggcagagacgcagtattgaaagggtccacaaggtcaaggccagccgggatgtcatcattgatcaactccccgacctgatgggactcaaagccgtgaatgtggccaaggttgtcggaaccaacccatgtgcggatggaaatggagggtgcagccatctgtgcttcttcaccccacgtgccaccaagtgtggctgccccattggcctggagctgttgagtgacatgaagacctgcataatccccgaggccttcctggtattcaccagcagagccaccatccacaggatctccctggagactaacaacaacgatgtggctatcccactcacgggtgtcaaagaggcctctgcactggactttgatgtgtccaacaatcacatctactggactgatgttagcctcaagacgatcagccgagccttcatgaatgggagctcagtggagcacgtgattgagtttggcctcgactaccctgaaggaatggctgtggactggatgggcaagaacctctattgggcggacacagggaccaacaggattgaggtggcccggctggatgggcagttccggcaggtgcttgtgtggagagaccttgacaaccccaggtctctggctctggatcctactaaaggctacatctactggactgagtggggtggcaagccaaggattgtgcgggccttcatggatgggaccaattgtatgacactggtagacaaggtgggccgggccaacgacctcaccattgattatgccgaccagcgactgtactggactgacctggacaccaacatgattgagtcttccaacatgctgggtcaggagcgcatggtgatagctgacgatctgccctacccgtttggcctgactcaatatagcgattacatttactggactgactggaacctgcatagcattgaacgggcggacaagaccagtgggcggaaccgcaccctcatccagggtcacctggacttcgtcatggacatcctggtgttccactcctcccgtcaggatggcctcaacgactgcgtgcacagcaatggccagtgtgggcagctgtgcctcgccatccccggaggccaccgctgtggctgtgcttcacactacacgctggaccccagcagccgcaactgcagcccgccctccaccttcttgctgttcagccagaaatttgccatcagccggatgatccccgatgaccagctcagcccggaccttgtcctaccccttcatgggctgaggaacgtcaaagccatcaactatgacccgctggacaagttcatctactgggtggacgggcgccagaacatcaagagggccaaggacgacggtacccagccctccatgctgacctctcccagccaaagcctgagcccagacagacagccacacgacctcagcattgacatctacagccggacactgttctggacctgtgaggccaccaacactatcaatgtccaccggctggatggggatgccatgggagtggtgcttcgaggggaccgtgacaagccaagggccattgctgtcaatgctgagcgagggtacatgtactttaccaacatgcaggaccatgctgccaagatcgagcgagcctccctggatggcacagagcgggaggtcctcttcaccacaggcctcatccgtcccgtggcccttgtggtggacaatgctctgggcaagctcttctgggtggatgccgacctaaagcgaatcgaaagctgtgacctctctggggccaaccgcctgaccctggaagatgccaacatcgtacagccagtaggtctgacagtgctgggcaggcacctctactggatcgaccgccagcagcagatgatcgagcgcgtggagaagaccactggggacaagcggactagggttcagggccgtgtcacccacctgacaggcatccatgccgtggaggaagtcagcctggaggagttctcagcccatccttgtgcccgagacaatggcggctgctcccacatctgtatcgccaagggtgatggaacaccgcgctgctcgtgccctgtccacctggtgctcctgcagaacctgctgacttgtggtgagcctcctacctgctcccctgatcagtttgcatgtaccactggtgagatcgactgcatccccggagcctggcgctgtgacggcttccctgagtgtgctgaccagagtgatgaagaaggctgcccagtgtgctccgcctctcagttcccctgcgctcgaggccagtgtgtggacctgcggttacgctgcgacggtgaggccgactgccaggatcgctctgatgaagctaactgcgatgctgtctgtctgcccaatcagttccggtgcaccagcggccagtgtgtcctcatcaagcaacagtgtgactccttccccgactgtgctgatgggtctgatgagctcatgtgtgaaatcaacaagccaccctctgatgacatcccagcccacagcagtgccattgggcccgtcattggtatcatcctctccctcttcgtcatgggcggggtctactttgtctgccagcgtgtgatgtgccagcgctacacaggggccagtgggccctttccccacgagtatgttggtggagcccctcatgtgcctctcaacttcatagccccaggtggctcacagcacggtcccttcccaggcatcccgtgcagcaagtccgtgatgagctccatgagcctggtgggggggcgcggcagcgtgcccctctatgaccggaatcacgtcactggggcctcatccagcagctcgtccagcacaaaggccacactatatccgccgatcctgaacccacccccgtccccggccacagacccctctctctacaacgtggacgtgttttattcttcaggcatcccggccaccgctagaccatacaggccctacgtcattcgaggtatggcacccccaacaacaccgtgcagcacagatgtgtgtgacagtgactacagcatcagtcgctggaagagcagcaaatactacctggacttgaattcggactcagacccctacccccccccgcccaccccccacagccagtacctatctgcagaggacagctgcccaccctcaccaggcactgagaggagttactgccacctcttcccgcccccaccgtccccctgcacggactcgtcctgacctcggccgtccacccggccctgctgcctccctgtaaatatttttaaatatgaacaaaggaaaaatatattttatgatttaaaaaataaatataattgggatttttaacaagtgagaaatgtgagcggtgaaggggtgggcagggctgggaaaactttgtacagtggagaaaatatttataaacttaattttttaaaa

SEQ ID NO: 71 - DNA, 123192 bp, Mus musculus
agcttgccagttgtttccaggcccaaatctatggaaggcttggggtccttgaaggaattgcttggggaggctggagactgcagaagtgaggggctgatggagggaggaactagacaaataaggactgatagattgtcttccaggtgtctaccccaatgttacacctacctccttcagtctcttcacagcatatgtagtatttctcatgactgctcggtacacacatccaaaaccaccctctccaatcctgagttcttcagagaagttgcaggtgccttgggaaatctcacagaagggccagcaaaacggggagggatgggctctttggaggccagacactgggctctctgggcttgactgctggaagagaccatggaccaggcgaggaccctatctattccctttggtccaggttgaaagctcccttcaacactagttgtctctcagatgacctggctgtgctgatttgggctctgtggtacaccaaaggttaagtttcttcctctttgtctggaaaattccctgggggttaagagacacctaccttggtggaggaaggggctgaagatggtagtggtggcccgagggaaacagggagtggaacctggaggagctctgactcagaatgggtctgggagcctggaaaagcttcataaagatggcagtgagaggcagagaccagcagcagtctacagccatgtcagcagtcatggtggccttttcctcaggcatatcaagcccaacacccgggttctttttacctggggagaggaaggtggaggcagaggactgcaatttccgggggctccagtccccggcctcagagcctgcagagatgctgctgggccttggggcagcggtgcttgggggcacaacgggggcaggagggtgccctgggataacaaggaaggaaaggagggttgtgactcagagctctctatctctaagtgaaggggtgggggggggggagttcccatatggttccctgtctcaggaaactctgtacccgtcacccctcttgggttcccatccctagggtccctggggctatgctcgctcacaggctgtgatgatgtccctcgcacgcagcagctgcaggtgcgtgaggatgtgaacgaggtcagctacgcgcgcgttgcggttgatccagggccacagaacactggctgtgcgctgctcggagcgctcgcacagccgcagctctgtctggtcgcgcacgatcaaggccgctgcgggatggggaacatcaggcttcagctccagaagcctgagtccaccaccccacgccggcctgccgtcacccaccgaactggcaccagtcggcgggctccagggcgtccatcactttgtagaagcggcacataacccagggtggcacctcgtacaagaagtgctgggcgcctggaaccacaggctccccggggcccggccccccggccatggccgccgccgccgcccccgggccgaggcctctcggggcctcggcgggcgcgggccttagcgggccgggtccgcggacactgactcacttccccttcaggccggcctcgtgcgacacccggccgggcggaagaggcggcgctcgacccgccgccatcttgccctccgcggccttccgccacacgggggcgtcccgcgccgcccttgacgcggggaaggagctctgctacgtaggagggagtccctaatgggagaaccgaggtctgtggtcctacacaaacatctgaatagggctcaacaggatgaagaatgacttccagttctagagacaaagggcacgatgtttttacacgatgttctacaaaggcagtttatgccaagcctggtgaaagtcacggagaggctaccctcgctttagttggggagcagtttgagagccagccaaattgttggtcagtcagggttaaatatgggtaacaaaatggccctctggcagactgtagtcatttggtgataaggatggatgccctgagaatggtctggaagagtgtataccatgctactgcttgtgtgctagatctccatgcccccaccacgcccccaggaaccttccagcagctgggccagcaagtgttagatcacagaatctgcctgtgcaggattctaattagctttccaactaacacatttatgtctcttaacatacacatggtgttcggctctaaatgtccctttcctttttctgtcacacttttatcttagtttgcacttctctccataaggatagtagggtctagcagcttctcctacccctttctagagtagttgttggtgataccacctgttgtgacctttagccacatgaatgagtgtctcttgcctattcctctactgttctccattcagggttttctttggcctttttggtcactatgacacacatctcagcgcacactactttctcattatgctctctgaagtcctcttcatatgagtgcactactcttagcattagccattgccactcacctgcacagactgtatggcttggatagtgctccctgctcaggtggtcttcctcaagtacaaatcactaaagcccagctctttaaaagagctgttaggaagatggcatagccagcctctgtccacccacctgaacttatatacaccaacagccttaagccagatagaactctttagatgttgggcttggtggtacacccctttaattcctgcacccagaaaacaaaggcaagtgaatctctgtgaatttgaggttagcatggtttaagttccaggtcagccagggatacaaagtgcaaccctacctcagatcaagaccaaacctgaaaaaaacaaacaaacaaaaaacaaaacaaacaaaaaacccaaaccctgtttagtaggtgtcctgaaaagaacttattctgttctgaaattgagtttgcatatacacccctgctgtagccattcctgataagattgaacataaacagctgtggggaaaacttcctaaacccagctcctctcttgaacacaccttgagcttgctggagttctgtacctctaaacttttctcacttctcactgcccagggatgatccacaggcagcaacttggtattccttgtttggccagctgaaagcatgcttgtaaagcggcagctttcttctcctgaccagtttccccaacaaacactttttgtcatatcaatcctaactacaaagggttctctctcactagcctgacctctaaggaacttatagtatgtcttcagaaaggtctacacaagatccatggctggctcccactggggcctcttctttgaagccacagtaattgtggccactctcaagatgaggtcaaactagatgtggtggtgcatacctgtaatcccagaactctagaatcagaggtaggaagataactaaaatttcaagggcagcttggtttacaatgcatagttccaggtcagccagagctacacagtgagaccttattataaaacaaagcttggcatggtggctcatatctgtaattccagcacttgggaggctgaggcagatcaccctacatactcagttccaggccagcctagagtagaagttggaccctgactaaaaccaaaacaacccaagaggttaaccatatgctgagcttccagtggtttctcatgggtcagtctatattaagatgtgccaactccattatccaaaattatcatgtgtatatatgttaaactctatgggcagggatttggtcctttttatggacgggggactctcagtgtctggtacacacctggtactcagtgtattctccatgtctataggttgaatcatcaatcctttcatgtaacatttgaggccagaacttcaagatagcttctaggtatgctcacaattatttgtgacatgccattatcctctcctccaggccatatcaacctatggagtaggtggctgcagaaggctcatattcttacaggaaaccagtgacacaaggactccctttgggcagttcctcatagttgggaggaaagtgttaacactatggcacaccaggacctagcagctgcccctgccacactggtcaggagagggaagctatgctctaggcacacttgtgtcaggccttcctgtcgaatgctggtgtagtatgcttgaaaaatattgacacagagcaaactaaggaggatgccagtatatgaaataggcttccctaccctcccacacctatcctgagagaggctactggggttcagggatagctgaatcaaacatatcatgctgtcaggtgagctggaggggactggtgacttataatgaaagcccagaccttgagtcactttcacagagagatttatcgagaatgctaacagcacaggatacagtacttcccaacaaaaggtgcaaacgcatcacttagaaaggcatgctgagtattctttgctttcacatgtattaaaaaacttacaaaaataaaatgaaaccgcgtgctgcccatcttttcaaatagtaaaagaaccttatgaaaaaccacttgattttacaacaaaagacacaaacggacatttttatgtaaatttataaggcaaactctttatataataaataggttacaggggttcagtggggtgtgtttttgaaacgtatacaggtacattcagacaggtttactgaaatggtacaaatttccttaataaattgccttttgtttttaaatatatcagtgctttcagtcatttggctatacacaaagaaccttttgttttgaacactacaaaaaagcaatcaatattttgtttttaaaacgacctacttattttctaaagtaattgtcccaaagcacaaaaactgaaggtgaatacgacagagggcttttcaagacccctccagcccagctaggtctgtcctggatctttctctctgccttgtctgcctgctcccaaccttagatgagtttttgagctggtgacaaacacaaggtggcttgtcactggctgcactattctacagatctcaccccccctggctggcagaggggagtacaacatggattttggagggggcatgtaccctgtctggttgttccagctaataactactatagccaactggtcactacaggtagaactgtccacatgaggctccaagggaacactgctctgttcctcttacattaggctggaacaatctgcaatgagaataacactttactgaggatgtttgccatagaaacaggtggtatctcaggcccagattttgttgggaattagatcacattgaaggaaaggagtctctgctatcattttatcccccaggcatggcgggaacagagatatcagattagtactgtgtactagggggcaacatggagtatgacagaagtgtcctgactggtcatgtctttgaaacatgccttgtagacaataatgtccatggccttgacttatctattaagaggtatcttaggcagggagcggctaatttatcttctgtcttctccccatgtccacagtgggtcatcctcctgaaaactcagaccaagcctttccatactcagtgagcacagctctgtgttaatactcctttccctcctggcactcctagattattacagcagtagtaataatctgggaaggagaagcaaagaatccattggggtggaaaagctggttttgctttgactttgaaaatggcaaaacatcagcttcagtctcttgacttggaatggaaaaccagtgcttaacttttggtagcttctggctgatctgggcagggatcaattcagattgcccctcttgtcttattcaccacttccctcccttcaaatgctttgtttgtaatgaaaatgtacctagaagcatttgtctctggaacaattactttaaacatagttacaatacagacttcatttcaaacacagaagagatttacttagcaaagttcctttcacccaccaaaaattacacaaatagaagcctcaacaccacagttaaagaggaccagtagagaaaacctcatgtttggaacacaaaaggaaaaataaaaccaaaccaaacccaacagaaaaaccccagaaagacaaggaaagggcaaggaaggaagaggaaggagagcaaacacagcacacattacagtgtccaggtacacagggagcccagcacaaggaaagggctcggcacacgttgagtaacagtcctggtgatatttggtcatatattcatcaactactgactctggagcggctgttattgactgaagcagtgacaaatcaaatggaaaaggaggccgtgctagcaaagtaaggaaaaggcttcaagttctgtaagccttttgcactccattgtccagctgcccagaaacattgaaccaggtggcctgctccatccaggcagggttagaggtcaccaggtgaagctaacttgggtgctgatctcacatcagccataaaacatgcatatggacatacatggtcacctacctgtcagtggccaagtaagtagcagtggagacaaccctttggcttcttctgcccccatctcatgccggctggggaataatgttgtgacactctactaatactgattactccctagagcaaggccctaggatagggtctcagaggcttccccagcccatcttccaagagctccaagggtagcccagtcacccaaagggcctacaaatatctttgctgtattctggccttagaagcagcaatcatgaggagatggggtagaggtgtgggacagattttggccctgattataatgctctctgctttggaagaacaaggttctggacttttttttggggggggggtgtttttaattatttaagaatgatccttttgcaaaaagaactgttacagctaattttttttttttagcagataatgctcattaaggattacaaaagcaaatgcagttactcatgggagcagggagaagagaaagggatgtttctggagtcttcactactttctggaggagacccattgggctgttggatgtggttctggggtccctggcattctacctggtacagcttacacaccttggagatagaccaaatcttctatcttctctctagtccctagactcagcaaagtttggagggtttttaaatgctctgagccctgctaactggggaaagcttgtcagacttactgtacacaggctcttcctggccagggaaaggtggagggagttgggtcacccccatgcatgctagctccccatccctagaggtggggactaggctattcccactaagttctgtacgtcagcatgtaaagggagtgctcttgtctcctgaccccatgctgaaatgaactgtcctgtacccagaatcttggggcccctttcacaacagaggagaaacaaagcacaaaacctgggtgcagcctggagcttccttcacttagcacagggaagtctttgaaagacgcgaggaaagatcacagatctgcttggattgaagaagtgaccagcagacagatgtgttttttctttttttttttttctttttaaattttttcccttgtcctactctatggttatcagaaatattgtaattaagcaacaggtataattttaaaaggtttttctttttgtgtgtgtgtggcgtcacaagcaaaatgagtttataattgtgaaatatacagatatatatatatatatatatatataaattcaactgctttgtgtgtctagttggtgcataaaataaaaataggaaaactaaaagcaaaactgaaaaacaaatcaaaagcccagaatagaagagtcaaagcagacctatgcatacaaatctcttaagttactggatctaatcagagtcaccaggaagaacagctttgccacttgacacacaaacactgcagggaaaggactatcagtgggcaggagccaaacctctttgccttttcagcgcatttgctttcagtgctaagcagggccccataaaaggtgagaggagcaaggagcaaaggtcatttgcaacttgtccaaatgttcttaaactccaagatggcacttagttcccacaaggggctgagtcctgcttgtgcaaagcctaggaggctgtctttcctcccagagcctttttactacctgcctgcctcttcctcttttctttctcctctccattctatgggctctaacacctccccagaagacaggcagactggcttaaggaggcagggagaggctctggggtaagtttaggagggcatgccaaagtgcttgctacacagccatttcgtatgtgccaagatcctgaaggtcaggtaggtagagtacaaaggatgggagggggcccagggagggatgctctgtaggaagtagaccctccctaatttgtgcagtagtgctggggcaggctcagttaagaagagagcagacactttgtgctgggccttctaggttactgagtgttcaaattgataaaccaagagctggtctcatgcagctttggcatctggcagaccactaacctccattccaaatgacaaggtcagaagtagtttctggggccagctacccaaagagtggctttccaatgctaaaacacctcaaatctcaagaggctcctggttctacctcctctgatgcaggaggcttcagccttgagttcccattgctcagttcactcattagacacctcaggcctaaagtaagtatttatagatcaacattttttcaaaagcctcctcttattcataaacattaaaatataattttttgttaaatgttttcaaggttttccttctaaattgttcagaactggtttcagtgttcaagttttcccctttagcatatatttttagaccctgggggaggcagtattctagcaatttataacaattagactaagccttttctatatagtacctaaaagagaaagacataaaaatggagagaatcaacaaatctcttcagagtggggctggttcactgaagcagagagcaggaagaaggagccagaaaaggatgtggatggagcagagggcttggctctggcatgaggcatgcggcatctgccctagcccccttcagtttttgtacttcgctataccacagtccacaggggctttttttctgagtctcagtcatctgccctagaatctgtagtgttaacctgaatctacaatcttgggcaaagatataggctatgaactgatgcacaaaagtcttcttgaagaactggcacctgtgatgtctcctcagcctgaagagcctggctggaatgctctaggagactgtagtagagaagtgctgcagagttcagacagctggactccatttgggctgcatgaaatcaggctggtctcatctggtcagttctaacccttttgctttttcctggatgggtttgagccacttattacaacctatttaaaatccagaggtgctgtcagctaaggaatttcctttctctgccaaacctggcagtctgttttaagttactgccttgttttatcattgtcagagcaacggaaagctgaataaagcagcagcaattcgggttgctctggttcccacgtccaatgttcatggcctctagtctgttgtgatagcactgaacagagttgtctgtacccatgctgggatcatgggcttgtttggcactgatggactgggggagatggcatttctagatctcccctgtgccttttgatatggaaatacagcaccagcagaaaggagctgtactactagagcctggctgtgaccaagagtcctcaactcactgcacaccaagggcagcagttccactggttaagacagactcaagaacaggcaagcttgggccaggatgatcatagttggaggatatacagcaatctatctgggagaggtagtagctaacaactagaacagggtagggaagactggatgtgaccttagtgacctagccccaggtatctgaaagctgttggtcagtttctggattcttcacatattcagtttaaggtaccacccacactttacaatgttcaaatacaacaaaataaaggtcacattccaggtctgagccagacacagctggtgagaatcccatgacttaaggcttttccctccaacctcctgtcaacctgaccacaaggcagaggcagcctgacagggtccctggcttccaggggaaaaaccccaccaaagctgcctgcttaaaggagactgacttgtgatgcccttatttgtggatgagggaatggggaaagaagcaagaagtgaagaaaaccctaagaagctgcagttaccaccacctgcagttttgaaatcagttctacatacaggtaagtggggggtggtggtggtggtgagggagctgcagataaaacccaagtaaaagaaaaacggcacccaaagtgctgcaatcccaaaagtaaatatctaatcagcctaggttgtcttccaaagatgagggatacccaacttggagtccatttgattggactaagtaagcctaacaggtaaaattccaagcagaccacaataaacaacttggtgtcaacctggctaggtgttgtgaaaagtatggaaaggtgtcctagaggagtgcatggggcaggttggggtggggcagtaggggccttttgtcactggaagaagcaggagttcagaaggacatatcctggatcctccagaattcctcttctgacccctcctccctctccagggaggaaccagaagcaagactaagaggatcaaaagcagagcaggcaaaaggactgcctgacagaaagctggttgcagggtttgcttttatagcacaaggaaatggatacaaatacactaaaagtccaactatgattcggcaaacagaatggggcaagatctctcacttagttctaaccattccataagagacaaacatggttttatcttaagctatcaattggaactgtcaactacggttcctgatcactaaggactggccaggaagtgctagacgatttctatgatgtttcactcttccatgattacaccgcaggaaggaagctggggaacgttaacgaaaatacacaagacaatacacactcgacagttcatggcagcagctcacatgggacgtgcctgtgggtgtttctggaagcataagactgctgtctcatttgctactttgataaggtacttctcagacagatttcgatagatatgagacatctctgtaaacacagaaaaggatataccaatatgatgaagatatgcagctagataaggacttcctgaatggaggttaaaactttgggatcccaaattaaaactgaccaattaaaaccccacagcaaagtcaagtctataaaattcaccactgtacttatggagcagagtttgaaatatgggatgtgctgatgcttcccagtccccagtgagcaagaggttaagaattccactagaaaaagacttgggatgtgtatgtttgtcagaagaagggccaagggccctggtgtcactccctgcttaggtctgcatctgtcctgacaggtcccctgcccacactaagtatgacattagatttctgagtagggtcaagggtagtgggcatggagcccctgttgggccatgcaacgactctggcaggccataggggcctctgtatctccttcagctacccaatgtgacccagattttctagtccacttttctagagtaaaaggtgaaaaggctcattgtttaaggtctgaaagccttttgacatttttcttagcaagagcaagagcttcctaccttcttgttcttcttcacagaggttagggagggctcaaaagagcccagctcttgctcaaggttaaatatgatacctggcactggcaatgggaagttaaagggcaggaagaatcctagggctgcagctgactgctgttaggtaaccatgtggttcagcactgcagctgcctggaacagaagaaacaactagaagctaggggaagaaatgaaagcatgaaatggaaggaaggaagaaatggaaggacgagagagaaagcaatcaggaagtccttataaaattgcagcaaacacttagagtttcggagcttcttgggaatcctatgtgctgagcccactttaaaacaagcgcaggtatatacagatacaggtagttctgaacactgccatgtctggtggcttgtgggacagtgtcaccatttcaagccagtttgctttcagagcatctgtttgttttgaagtgggaacatgaagactcaatagtgcaaataattctaagctgtccctaaaggagaactggaaagtaattggaagaatattttcctttcttccctcttaattactagtcagactgctctcttgttctgtggcactaggcctggcttgactccacctagcctgcctgtactttgtcctgctgcctccatggcacctctttagcattatcttctaggggagcatgccttgtgaacagatgatgacacttcactctgggccatactcttctgtggctcaggctagtttataagccatcagtttaggactcacctctagccatgtcagagctggatcagacaggtgccactttctttttttgcaaaatatccttgtcagttttggattgggttgatgtggagccagatctgtgctaccacagttggaattactgggccttaatcactggccaactccatagtcttctcccaagagtcccatagtttctcctgcatcacacctcccagtccttcagattgggagttggggtggtgtaaaagtcagggaagctattatggacagggcatcaatggcaccaaaaatgggagtgtcctctcaattgccctaacgagcacacggggcgggggtggggggggggaagagggaggatattgttggggggagtgcctggtcaacagcttgtctggtcagtagtatctgcagcaagccttgttgaaggagcctagtttagaaaagtgcaaagctacttctggccctggttaggtcttcaacctgactgtgcttgtcggtaagaaaaacatcccaatgctccaactactcccaccccgaagccacgaaactctaagtttactgaaagaaaaaaaaatattttttatttcagttaatcgggaagctttgtcagagccctacccataaggagaagagacaacagctgcctttattcttgttggtttgctttgcaatccgctctatgtaaagtcagctaactctctcggtcacgggcgtccggctgtccacaggctcctctctgtttggccttggcatggaagatgaaacaatgtctttgcgctctccctcccctcggtgtttgtacttttctgcaactgtggtagtggtggcgaccataggctgagtcttagctggctccttggggcagccatcgctttccagtgagcctcctcggggcatcttctcttctttgcagatgctgctgctcaagtcctgaggctcaggggggctgatggggtcctcagagctctcaggctcaggtgggggtggggatgggagcagtggcatgggggcctttgtggactctgagtgatggtggtgatgatggtgctccttcttaggtggggaggaggcactgctgctgcgccccttggggctgctctccttgcttttacgcccagggctcttgcaggtcttcagtcccttcccgcttttctcaccaagggtggacaccagcaggggcttcaccacttccttgacctcgatgctgaccgtctcccgggtcttgcgcttcttgatggggagcacagtctcatgcacagaccgtatggaagactccttcacggctttctttttggcctcagctgcagcagctgccaccacactcccaggctttctaccccgtttcttaggaatggcctgggggtcagcttcagcttttcgctttctgccagggcgtttgatcaccatgacctgggcagatgtggtagccccacctccctcacccttacccccaggcgatgcttggaaaggcatcttgacaacaagtttcccagggctcttctccaggacccttttcacctgaacaccttctgatgctgctgcctttggtctcccagtgccgctccctttggggcgtccccgacccctgccagttcctggagctttgggagatttgggcttcttaggtggtttctgctctctcctggaggggctccctctcccagttaccgtgaagtcaaaatcattagggtccaaggaggtgtctcccaccttttcaaagtatgcaatcaattctactttagagcgaaaagcttttccctggggactgtagaaacaaacagagagacacaaacaatagtcagaagctttttgacaacatagagactgagatagaaaatatgctgacaagctttcttctaagacattgtaagtgaacaaggaacaaactggaacacaaccgggccagatgcatgggtagaaaccatgttacagcttgctcagaagccaaaacagctggatctgaaaacagaggacctgccggccttcaagcccactcctctgtactccctggcttttccacaatccttaaactgaaggagtgaggtctagtacttgggggtcattgggctagactgaatatctttggttggtacccagacctaatccaccaccaaaacattcctccattttaaccaaggcatggtgtccagcctttttgggaagccatttcagtgcaataaagcttttccatcctagccttcctacccacctggccttcttgttctatagacacaagacttgctcttacttacttgatcaaatatacatcatactttccagcagatcggccagacttcctttgtttaagctttcgtgtccaaccttcaggcaaggtggggtcatcatacataggtccccggtcacggataatggagcgccgctgtttgggggaagccgaggcttctggcactgctggggcagagcctgagctttctgatgtttctgctttgcctgcctctgctggctctgcagaatggtgggctgaaggttgtagtggctcatgcttgccttctttgtcctccttcttgtctttcttcgccttcttaaacttcagtggcttgtctctgaggccctggagatcctggtcttctgacttttcctccctgaagtattaaacaaatatgtaagtattacagagaacacagctgtctgcacagtagtgagtataggtgagcttgagtgccacacatgagacccctggctgctgcatactatctctgattttggtaacttccctaggatactgtatccttgggtcaagctggggcccaaagatttcttaacagctttaggttgctggtgatattggtcaaacatatttgacctttatcatacttctctaaaccctagttctagtgctgttaaagtggcacattttttttctggaatgtaagcactgtatggttggcttcttaacatacagaagtcagtttataagttgcacccaatggccccctgggcttgccacatgacaagacaaaaacacataagataaataaaataatagggcaaagccagaagagggcatcggaccccttgggactgaagttacagatggttgtgacccgccatggattggtgggactgaatccagggcttctggaagagcagctggcactgttaacttgtgagccttcgttccagcctcctgactttccaattcaaaacaagggccccagcaagagatttcagcggtgtaacccaatttcctcatcccaacagcagctaatctcatccctgaggcattccgtgagaattatggacaaaaggcctcaaaatactgtaaaactattgctaactcagggaaatagcaactgctgcctagggttccagtatgagaaaaaaggtatcttgggtcacatgggtctttaccacaagatattactcccccccaaaaaaccctaaatgccaaaaccaaaactaaaccaaactggagggtggggaacaaaaccaaaaccaaaaccaaaaaccctatccttagcagaaaggtgtaatagaacagtgtataggccattagcaactaccatatccaaggacacctgcctattctttcttgtagacagaaatagcctccttctatgggttttggttcttttttggggttccttcatgtactttagggttcaaagcctgtcttggatgcttttaattaccactgtagtgcgacacagtgagcctttctctgactagaatctggtcacactgcactgcccctctgagctacaggccagactaaggaaggtttggaaagaagtagcagctgcctattggtctaaaactaagagaagaattaggttagggctatgatgtgcatctggaagcctgtggtctgttcacagttcaatcttcagactggcttattcagaagctctcagtgacagaagaaaagaaggggatactcaccagcaaagctggcaaaacaaaggccaacaggtacccatcatgtgcatataacttcacaggccccttttgaacaccagggctgctcccctgattctgaacttgagtttgagaaaactactagagtaacaaggcaggctggctttggaattctcacttgtattcttaaatattttaaccaccatcaaatataaactatatgagcaaaggaacaccttctagaaaatctaacaaccaaggcataaaataattttcattacagttttattttcagtagttaagaatgcaggcctctcaggtcctcatgaccaaggagacttggagaatcaactacgggatgcctacatattggaaggttgtgcagctagatgagtatcatgatcttttttgatgtaacaaacaaaacaaaacaaaacaaaacaaatcaaatcaaagcaaaacaaactgcagacacatttcccatatggatcaggtgtacaggattgtaggctagcctagaaaattaacaaagtctagagtaggtgaaaactaggtaagagctcttgttgaacacttctcggaatatatttttgactaatgaatcacataaatacttacacaactaaaaagtaacaaaactataatataatgcatgcaaacaggaacaaaggagcttaactgttactatacaaaaaagactaacttttgatcatagtacttctgtggtgggatatattccaaagtcaacagtaatattctaggggcagtatatacactaaaccagctcaaagataaaattggtgactctgattctggggcatcctctagtgccagtaaagctagggatgggagtacaaaaacagtgggtgggggagggggagtcaagaaaaacttttagcaatagcctaggcatggccaagtatgtaggcagtaatgaatttgagatctgtatagcagagtaatcaacaaggcagaactaagttaattgtgggcagaccgcagtgcccacctaaaaatgctgaaccaaataaatatcgtagagaagacaaggaaggaaggactatacagactaaagaataagaagactgaggagaaagaacattcgaacctaacacacaatcctggactggattctagttttaaagacacacagagcattaatgagacatttggggaaatgtgaataatgctttacattagcttattactaaacttccggactgttgtagttatgctgtgtgctattaggaaagtcagcttcaaatatttatacctgaacatcaagatgacttccaactctcaaggggattcaggggtggaagggatatgtatagtgtcaatgttataacatgttttaaaagaggaaatgacatcaatatcatcagaaaccctactagtttatggcaattaaaatcttttgaaacagagtctctttattatgcagtcctggtggttctggaactcactatgtagatcaggctggctactaacacacagaaatccccttgcctatgtcttccaagtgctgggattaaagtgtacaccacccgatggaagttttttttatggttatgctaggcagtgctctaccactgagtcatatccttagctctaagagtagtattttcaagaagtaataagcaagcttttaagaaagagtaactttgtgttacaagaaaacaatactagatcaggctgcatattacatacatgatgaattctaggctagctagcactacatatccatacccagttagtcatttttcttgttagttttgttttcccaaacagggtctcattatgtagctcttgctgtcctggaatgaaatacgtagaccaggctggctttgaactcacacagattcacctttgtcttccaagtgctgggattaaaggtctgcacagattgatttttttttttttaagcataacaaaaagaaacacctggaaaccttgatgaagcactttcttttagtagctcaaactgccataatgcctaaccacaacactacactgtatttggtgaagctccaacatggggataaaacaaatataaagctacagttttcatgtttaagaaaaaaagcactgccaaaggtagcctagtctgggctccaagaacttgcctgcccaggagcaaatgacatccaggatcttttgaagctacatgagaaagcgagcaggctggttatggtgagaagggatagttgcaatgtgcaagatagggtctcacaaagtccaggttagcctggaactcttgagtcccactcgccccccaagtgctgggattacaggtatataccatgtccagctttgcagccattttttaaaatgcttgtatgtgttggggtgtatgtgtgtgtgcattagcacatgaatgtgaaagccagaagacaattttgagtgtcatcttcaaggatgccacctacctcctctggggtctcttactggcctggaactcatcagttaggctactctggctggtcactgagtcccagggatcatcctttcttcacctccccagtgctgggggtttcaagggtgtggcatcacatccagcttgtcacatccaccatgtcagttaagaaacaacaacaataaaatcccactcctatgagtgatgacatgcacctgtatgtaatcctagcacttgggaggcagagacagaatgactagaagttcaaggcaatccttgactacacagtgggtttgagactgggctgcctcaaatcaacaaaactgtaacaaaacaacacaaaaagttctgtagtgaaaaagtcttgacaactctgaggccaaaatgttacatataaagttcctatggcctagcaattccattttgaagtacagattccaaaaaactgacaataggcctgcaatcagatacttatatgctaatgtttgcagctccctgacccctaagaatcaaaaggtgggagcaatccaagtgtctactgatggatgaatggagaaaaacctctcacgacaacgaaatgttgtttaacgttaaaacagaaaggaattctgatacagtataacatggacgagtctcaagaaaacattctggccgggcagtagtggagcacacctttaatcccagcacttgggacatctacagagtgagttccaggacagccagggctacacagagaaaccctgtcttggaacaagcaaatccatagtaacagaaagtcatttgccagggctgtgggtaataaggaatgattacaaatggatatgagagtctgccccccccccccccagagtggtgggagatgaaaatgtttgggaattgctatatatgatggttccacaacactgcaaacatacttgatgccattgaattgtatactatattcatttattttttgcagtgttggggattgaactcaggctttatttgtgatgggcaagtgctccaccagtagctaaattcttagctcttttaaaaaatttttatgttgagatagggtcttacaaaaagttttcaacgcaggtttctgtagcccagacaggccttgatgtgtaattcttttgtctcagccttcagagtagctgggattaccatcctgtgccactagactcagactaaactatattttttatgtatgtttgcacgtgtgaatatatatccataacatgatgatcttgaatttttgatcttcttgacttcatctcctgagtgctgggatacaggtgtatgccaccgtgtcctatttatatggtgctgaagattaaaatcaggactttatacatgccaggaaaaatactctactaattgagccatattcccagtcacatttttttttaaaaaaaaaaaacagattcttgctatgctttaaagacaggttaaccgcaatttatgatcctcctgcttctgcctcccaagtgctgatacaataggtatctactaccattgcagggcccccagaaaggaatttagttcaagaagcttcacaactaggggttttggtcaggttatagattattagctaaatatcctgagggtagttcattatgacaaaaactgtggtaaaataaacacaagcataaagcttaccattagttgcatctagcaatcattactactatctagctcctgcatattttggtaactctcaaaggaaaccctgtattcataggtagttgctaactttctaattcccttcagtccttgacaactacttatctttttctgttactgaattggcctattatgtatttcattattcacagtggcatcataaattttgtggccctttgtgactcatggctcttttctttcataaagcataatgtctttagagtatcatggattagaattttattcctgtttgtttgatttttttaaaagacagggttcctttatatagtcttggctgtcttggaattctgtagcccaggctgtccttgaactcatagacatctgcttgcctttgcatgttggtgatgggagtggaggtatacagattcaggaagctcattgataaaccatgtttcaactgagaaaggcagaagaaagtgacagagcaggacacctgatattctcttctagcttctacacatgtactcagggctacacagacctgcacacctacacaaacataaacaaaccatctatatacaatttaaaaaattccctgattatccattacactggctattaggaatagtgtttctatgaaatattcacatacaagttttatgtgaacatacattttagttctcttctacctataaacctaggagtgattactacagtacatggttactcttatgtttaaccttctgagaagctgccagactgcttttcctttagaggtacttcaaatgttctggaactagatagaagtaaagtggggtggcagaaatgcttcttgaatgctcagtagctagtggtgggtttaaatagaagtgatcctagaaccagggtatggtagtacatgccagtagtgtaagacttttaggaacattatgtgttgcttcatctcactcactcatgcattatccaatgtcccttaaacatcaatgtatcttgttcatgcttacacttgggccatcaataagactctacctgcataaagcatctgttgctgctttttctgatatggttggtattccaaaataaaagctttggtaaacataaaagatagatgccaggagctagggaagactcatcaagtagccagaaaggctccagaacaggggtaaaatggctactctaggactcactgggaaatcaggccaagattacaaacttggtaaaggcaaaagattcaggtagggtgtctttcccacagactgacctcataaatgagataagagggaaaatgtcagaatcactgtttatacaaacattttccattcattcattcattcattcattcactcactcattcattccttcttttgagattcagattcaggaagctcattgataaaccatgtttcaagggagaaaggcagaagaaagtgacagagcagggcacctgatattctcttctagcttttgagaagcctatattataagcaacttctgtttcctcactttcctttgggcctttgattctgtgttctaacaggtttctcctcctcttcttgtagttcagagactgaggaaaaggaggtccagtgacccgcccaaatttggatccatctctaggggaagctccaaggcctgacactattactgatactatggtgtgcttacagacaggagcctagcatggctgccctctaagaggcccaaaaagcatcagactgagacagatgcagatatttttttttcgagatagggtctctctgtgtagccctggctgtcctggaactcactctgtagaccaggctggcctcgaactcagaaatccgcctgcctctgcctcctgagtgctgggattaaaggcatgagccaccacacccagctcagatgcagattcttacacccaaccaatgaactgaagtcagggtctcctgtaagggagaggctggaagaagttcaggaggagggtagccccataggaagaccagcagtctcaactaacctggactccagagatctctcaagacactgagccactgaccaggcagcatacagcagctgatatgaggaccccaacacatatacagcagaggactcctggtctggcctcagtgagagaagatgcacctaaccctcaagacttgaggccccagggagtggggaggcctgatggggtagggacatcctcttggagacgggggaggaggaatgggatgaggaactgtaggaaggaggatcgggagggggataaaaactggactgtaaaaaaaaagattaaagataataaataataacaaatgtatttatacatatgcccatgtttgggtttgtgcatgtgtggctggaactggattctctggagctggggttacaggagacaaaatctgcctaatgtgagtgctataaattgaagtcttgtcctctgcaagagcagcaagctctcttaactgctaagccatctccccaaccctcttcttggtattttaaagacaagagtctctttaaccctaaccctaaaatcactcagtaagtagacacactctaagtccttttgccaatctgatctggggcagctgtccttgcctctgcaactctgcttgcaggaaacactgggcagaactttggctttggagctcatctttctggcagcctgcccactcctcttatcaggtgagggaacgatggcagagcctgatccacatccttgcacaggagttcttttttttttttccattttgatagctacacagtctttattataatcattcaacttatgagctgtagcagagacatagacaaaaacaatgcataaagaaatggatgagctgagttctagtagaattttatatgcaaaaaacaagcagtggcaggccaggtatggtgacacataactataattccagcactctggagattgaggcagcaagatcagaggttagaggccaatctgggctatgtagcaagactgtcacaaataaaccaaatcaaatcaggcagtgagccagagctaactctagggatgtggttcaccagctgctatgttaattgaagagaagctacgtaaacaagcaactggtattttcagtgattatagaagttatttggcctccactcaaactcctaaggtagagcgagaagttctccaaacacaaaatgttacctggagactgtggagtcacagaagaggtacaagataacagttttctaaagaactgaacataatgtcaaaaaaagacgacttgttactggccataacaatgtgaaggtccactggagactgataaggccaattcatggaacacaggagtgtttatatgtctttataaagttgattacaggaggtgagggacccaattataggaggtgagggaagggtccatgaacagagaatgctgggagagtttgattaaaaggggacagagtagagattagacagaggctaaagaaggtttgcatagctaagcaggaaattctaaaacacatttttatggtgataagtgtgattcatgagaggagagaatacaaatgaagtcccagggacatggaagagcagtagacaccacaagccggacagacaggaaatccttgtcatcatgaggtctgcattaggctctatgggtggaacaggttttagttatgacaaagtccagtccttgagtatgaggatgtgtgcctgaggtcactggaatggaggtggtcaaggagatggaaagtctgacactaggaaggttgtcaacatgttcaatatagtcaccttcaggatgagaggggctgagacaaagagatagaagctatgggtgtaaaaatgttctgtttctaaagtacacaggataggaaacaatcaaccagctgctgttggaagaggggcaaatttggcatgaggtgtgggtgtacagagaaaagggactctaacctgaatagggaagagtctagaaagaaaagcaagattcacactagaggggccttgggtttaaagcaggggagagatcaatctgactacagagattgtgtgaaagccaggtatctataggaaagcttacaaggtcacaggaaccctcaagagggtgtttggttcaggacagtggtagaagggctcaagggaaagatgggaaaaagagaaggacagtatggcacagcttggcagctccctaaatattggtactgtagggataggcagaagagtgtccagcctggcggactgaaagcagagcacatgtcatctggttgtgtggtcttatttacccagtttgttctgaagaagcctggtgggtcgtagggcaggcagtgagttgagaagaggcagaagagtacaaaacaaaaacaaccccaaaccaaagctttatcaggtactatttttgggccaaggaagggcacaaggaggaggggaaaaaaaaaccagaaggtagtgggggagagagataacaggcatacaacatacacctatgtgaaaatatcataaagaaaactcattattttgtaaaattaatatatgctaataaaaatattggtaaaatctgacaaaatgcatacttcatgttagcctctttctaccatagagtcaaacaagtccttggtaatttctttcagtgttctctatgactacctaatgggatgtctgctgaaacccaagcctgtttagggactgacaagaggctgaggatgacagcaaggcccatgactgttttatgtaaggtcacaagtagttatcaaccaattgcaaggactggtatcactatattaggttctttcaccatgatgctattgagctactacatgttggtaatgatataggcagaaaggagcccttataaacttgtcataattggggtttctactgctatgaaatttattgcactgtgctacgcaatgtttagactaagattttttgattacaatttctaaaaatatgatagttaatgagttaattcattagaatggtaatttcttctaaaatgtcttaggttcttaaatgtttaaagatatccttgcatatacatgcaacaccacaccaaaaaaaaaaaaacaacaaaaaacccaaccctttctctagtctagaaagatgggtgtaatagctagaacactatcctggtgaggtaatacacctactgaggggctttactttgtaaactactagtggcctaggaaacctatctctagatatcatggtacatgaaagataagtgcaatatcaactccaaattctgtttttaggctaagtagacaatggagaaatatcttaaaaatttaattacatgtacctctttctttcttttcttttttttggagacagggtctctacatagctctgctatgtagaccaggctgcctctaattcacaaagatccatttgcctctgcctcccacttgctgggattaaaggcatgccaaccaccaggcctggcaattatgtgtgtatctgtgtggggaatgtgtaattgagtagaagtacccatggaggccagaggtatcatttgcccctttctctagcttgagttataggaagttgtaagctacccagcagggtgtttagaatcaaactcaggtcctctgaagaacagcaagtgctttaatgactgaaccatctgtcttagttgcttttataatgctgtgacaaaacaccatgaacaatgcaattaataaaatagtgtttagttggcttatagtttcagaagattagagttcatgatggtggagcagggcacagtggcaaggacatctgaaagctaacatcttgttctacatattagaggcagaaaggactctaccttcctaaaaccataagttccaaattaaatgctttctttataagttgccttgttcctggtgttttaccacaggaacaaaaaataagacataatttctattagccaattcccctcattttttgagacaaggtctcactacacagcttatctcacctagaactatgtggaccagtctggctttgaattcacaaagatccacttgccacagcttttagagagctggagttacagacatgtactactatgtctagcaagggaattctttaaaaatttacgtgtatggctgttttgcctacatgtatgtctgctcattcctacaatacaaatgagatatcaagatgaacagaaacaaaacaaaagatgggaatgatagaccgtatgtgagatttatttgaaatattgcttttccactaagatatcacaattactataattcaacccactggaaaaaaaaatgacaagtgggattggctcagtagttaaaagtattttctgctcttatagaactgaactacctgagtttggttcccagcacccatgttggatggctcataaccatctgtaactccagctccaagggatctgatgctctcttatgatatctgtgagcacccacaatcatgtgggatatattcacatagacacatatacatagattaaagcaaaacaaataaaaaactgataaagttaaagatttttcttcctatatattatcaaaaaaaaaaaacccaaatcagcttttgaattggttcttagtgaatccaagaaacaaaacaaagataattcagattgtactgtataaacattatgtctcctaggaagtaaccttacagcatcattattcgaagaaaatgtgctttactaaaaaactataaaaagtttaaacctattaataccaaactcttccttttcaattttatcagaacaaaactaaacgtgtttaaattgctgagactcagcaagttcatttagccacagaaaacacacttccaagctacagcagtcacctacaaatgaaggaaagcagctgaagccttgtgattgagcctggaaaccaagcacaggtaacatacttacttacttagatgcaatggccagattttaaggaatgagacagaatttctgcctttcctttttcccttagacatcctgggagtctctatcaaatactttcttttcattgactagttgttgggtacctcaacacacgggccctcctatataggggaagcgaagggaagacacctgtgcacttttgtgctcaaggaacacattaaacatgaaggaaggcagaacaatgtgccaggaaggggcagtaagaaatgcctacaggggttagccagaacccaggcagagtggcaaattccctagtattggagctgggggtagtgccagtctctgtgcattcatcatttcctaaagttccctctagtgaaacagaaaaccacagaggctattctcatgggtactttaaatggtacatctgttggcaaaacacaaatgttgttaaacaaatatgaagttacagattgcacaggcacctgatagcctttaaaattcatgtctcttgttttgcaaagctgaactgagaaactgtgctgttaaatcatacacttatatttaaaaggaggaagaatgtgtggatgctacttagattctcattgatttattttgctttgggtgactacaactccccccaaaataaccccaaactcacatattttcccttttctgtgcacctctgacaggtttgattagctcatgaatagttggccacccaaaagttgatgaactaatagcagtgcaggctgttttattctgtccagcttattttaagacaaaaaccttagggcaaagtcccaatgcagaactattcatctgctaagtagttatgtctgagtctaggtactagagatatgtagcagtatctgtatactccaatcctctgtcttcatggggcttagactgtagtatggggaggagagtacaaacaaaaatattcagcttgtagcagatgtcgacaaatatcaggattggcagtgaaggggtggagaaagaagactttgacctagaagaacgtggccagagagggtcatagtagaagtgatccttgaatagacttgaaaaaaaccccggggctggtgagatggctcagtagttaagagccccgacctgctcttccaacggtcctgagttcaaatcccagcaaccacatggtggctcacaaccacccataacgaaatctgatgccatcttctggagtgtctgaagacagccacagtgtacttacatataataaataaataaacaaataattaaaaaaaaaaagccgggtgtggcggcgcacacctttaatcccagcactcgggaggcagaggcaggaggatttctgagttcgaggccagcctggtctacaaagtgagttccaggacagccagagctagacagagaaaccctgtctcgaaaaaccaaaaaaaaaaaaagaaaaaaaccccacaagctatatgtgtgataccaggaacagaagacagcgcggggtgtgtgtgtgtgtgtgtgtgtgtgtgtgtgtgtgtgtgtgtgtgtgtgtcaaggacctaaaacagattcttttctttatcaaacagggatgtgtcagggtggatccaggaagcccttgttactttcctgaccctgatgcagcagatgaatgactacattagacaccagccattgttctagctaaatgcttgggacatatcatgaatcaagtggacagctctgccttaaagtagcatatgctacaatgggctgatagtccaagtaagcactgtcagctacatagtgttaaaaaatgacaaaagctatggttggaggaaaagaagcccagtcatggtaggctccatgagaaggtagagattcatgcagatactcagaaaggcactgacttctatagacattagatcaaatggtgctgaaatgtcctagaaaaggatcagcaaaactggaactgtattgaacaatatgaaggtcattattgatgaacccttactgtgtagcatgccctagctttggcagcaaagagcttaggaaagtatggagagagacatagtgtcactggaaaggaaaagggaagtggtgaagctagaagggagcaggagccagaaacagtgccactgaggtggaagaagtaggaacagatttctagggaactgggaggagggcctgatatcagagagctctagagacacatcttgaaacagaagcaagagtgcagagctgggtctctcacatcataagggagaatgtttgagagcatgagggtgcaatgctagtctgtgggcattctctttggactgtttccctgctctctggaaactaacacagcagttaccagacaagagtgggtatgacagcctgttataaatgataggaagtatcccttttccccaactttacttcttcactctttggccaaagccttgaccctgagctgatggatccaattcctgagaggtgactgaactatgagagctctgatggattcataacttgacaacattactgggaggcagaagaaatgttattaggtatgatctagctagaagaattaggtcactgagggcatgtcttggagagatgtattttgtcctctactcggagctttcccctgcctcctggccactgtgaagaagagcttctctaacaatcttctatcaccacaggtccagaaacaatggagccaactgactatgaagggagactttggaaagtgagccaaaatacaatcctcctttaagttttcctcatatatttgtcatagtgctgtatagacagacatggccaaaggagatggaacaaatagagacacggggaactggagtatacctgtcaaagaaaggtgaacatgaggttcatctggagtgtattaaagagtaatcatattcattgtgtgtagagcagacaagggagataactgaacttcgccaaagctggtgctttattgaccaagtacaaacaaatgaccatggcattgaaactggggagatgagtgggaggtatggtcagattaaagatgcaagcaaatatgaattataagtatccccaaggtaatgagcatattggaattggacattacaggcagtaaacttgaaacacaaaagaggatctctgcttttgcagatacaagatttgaaagcgagtgcaatggctcagcaggtaaaacacttagtgtgatacacatgcatgtatgcatatacaaaataaaatgaagtgaaaagaaaaaaataacatgaactgggctaaattttctgatacttgaactagcactagtcactatgaatgcttgagaaagaatataaagatgtggttaatacagagcaaatgcagattttaaaagcctttgacagggacagaaggaaagcttagggtaacagtacttgttgctcttgcagaagacccagactcgggtgggtaggggattgggggtgggtgggtatgggggacttttggtatagcattggaaatgtaaatgagctaaatacctaatacaaaatggaaaaaaaagacccagactcaatttccagcacccatatggtagattataagtatctattaactccagcttcaggggatcctatgccttcttttttggatctccacaggcactattctcagacatggtacacatacatatgttaggtcttaggtagtctatgcctagaaatgagctcagaatggattatagacagatttctggtgattagctaaaacccagcattcctaaggaacttgtgaaataggttctcatcctccccccacaaaggagtaactctcttgtgtgttgctttatataagaatagctttcatgggctcatatatttgaatgcttagtcaccaggaagtgatactacttgagagggattatgaggtgtaattgttggaagatatggccttattggagggagtttgtagctgggggtaggtaggcttttaggtttaaaaagcccaggcaaggcctcctagtctcacttggcccatagatcaggatgtagcttttaactactttttcagcactacacatgcctgcagccatgcttcctgccaccataataatggactaagattctgaaactgcaagcaagctcccaattagatgcttttctgtgtaagagtcatggtatctcttcacagcaagaaaataatgactaatatgatttgtctcagtggagagccatgccctttctgctagaggctaactgtttaagtgtatttgcaacctggcccgtcaccctaagaaatttaagtgcagacatcccaaaaggaagaaatctccaacaaagaccgtaagagacctacaaactatcaagaaaggtatacttagcaaacttcctctatgtgaagctcatcttttctggcctctgagggttaactagactgcttcctcctaaactggagtctgtcaacctgccctgccctccacagaactcctgcctccagactccctttgtagagagaccatgtagactccatactccaaccccagaggctcttcagggcaggattggaggctcagagaatcagtatcatatagactccaattctgtccctagagaaagcagaaaatattttagagaaatcccacaagagaatcatatacaacgaggaaacatgataaaagtgttcagaaattaaaaataggttaggtacaacacatgtgctgtacagtgttttccagtatgccatcatttcccagaagagaagtctataatgacccaaaagtccattcacaggaactgccaggctgaaaaagtgctgcctcacctatacaagggagttggcaatgggaagaatgaaaatatagcttcttaaagcccgaagaaaagatcactatgctgatggggtgtgggaagaataagtgaaaataaactggaaaaaaaactgagcacagtgttcacccatcaatcaatcaatcaatcaatcagattatcttcctttaattttggaggttgaacttagagtcttatacattttttaaaaaaaagattttattttattattatatctaagtacattgtagctgtcttcagacacaccaaaagagggcgtcagatctcattacgggtggttgtgagccaccatgtggttgctggaatttgaactcaggacctttggaagagcagccagtgctcttaactgctgagccatctcttcagccttcttatacatttttaatgcatcacaaaaatcacttcattcctgtcctggctagttttaatgtcagcttgattcaagctagagtcatctgagaggagggaactcattaagaaaatacctcccagctgggcgtggtggcccacgcctttaatcccagcacttgggaggcagaggaaggcggatttctgagtttgaggccagcctggtctacagagtgagttccaggacagccagggctacacagagaaaccctgtctcaaaaaataaaaaacaaacaaacaaaaaacaaaaccaaaaaccaaaaaaacctccctaagatccagagaagggcattttcttaattagtgattgatggggaaggaccagcccattgtaggttgtgtcattcattcctgggctggtggttctgggttctataaggaagcagcaggctgagcaagccaggaggagcaagccaataaacagcacccactcaaggcctctgaatcagctcctgcctccaggttcttgccctgtctcagtttctgtcctagcttcctttgatgatagatgtgtggatatgaactaaataaacaccttcttccccaagtttctttttggtcgtggggtttcattttagcaacagaaaccctaagacaatccacaaacactttagcattcatgtcattatttaatgctgaaatttttattttcattttaagttaaaacttaaactcactgaggtgtataaaaatcaagtgtaccatctaatgacttttgctaagtgtatgcagctgtgtaacagacactcctaccaagacataagacaaacacaacaatgggaagttccctggcatctttcttgccacccctactcaatattatcagcaacatttggtgttgtcagggatttttttttttttttttggtttttcgagacagggtttctctgtgtagtcctggctgtcctggaactcactctgtagaccaggctggcctcgaaatcagaaatccacctgcctctgcctcccaagtgctgggagtaaaggcgtgcgccatcactgcccagctgttgtcagggatttttgtttgggaatcaaacctatagtatcacacatgtcaggccagcactctaccactaagcaaaaaagcccagcccttattatcagtttttaattttgatcattccagtggaggtacagaggcatttcagtgtgcttataatctacatttcactaattcctatgttatgattcaaatatattcctttcatgaagtatccattacgttttccttaactgtttgccacatttgccatgcaggtaagcaatgaggataagagttcagattccccgaagctcacataaaatgccaggtgggtgtggtagaagaaggtgtgtgatactgccacctggccatgttttattgttttaaaattttacttaaagctgttaattttccttctaagtgatattttgtgcatatcccacaaatcttacattatcttttctaatttttgtgttttttcctgactcatgagtaacttaggaatgtgttaattttcaaatatctgaggctttttctatgtcttatagttacaattcgcaatttaatttcactctgattagagaatacaatcaaaattcaaattaataagacttgttttacagtccagtaaagaataaggtctttacctttattaccctttggtaataatgggtactctgtagtcaatgaatttattactctgtaaactgtaattagattaagggtgactggtaatgttaagaccttttatatgctcactgaatttttctcgcagttctaccaattaccaagatgggaattaaaattcccaagcagaattattgtgggtttatatactttctttaatcttcataattttcttccatttttgtagctctgtacttgaacatatatacattcataaatgttaatgtcttcataataaattgacccttatcattttaaaacacatccttttttttcagtactggtattgaaccagggcttagcacatgctaaggaagtgtcctaccatattcccagctcttaaaatatgtcttgttatctatgttaactaagtctacttttttcatattattattgtcaccccaacattcctttacttgtggatagcattacactttaaatctcattttgtcatattaaaattatcttgaggctggagagatgactcagcagttaagagtttgtccagctcttccgaaggattcagttcagttcccaatatccatattgggtggcttgtaactacctataccttatttttttcttcctttaagataaggtctcactatgtatacctgactgccctggaacccaatacgtagactaggttggccttgaattcagagagccacttgactctgcctcctgagtgctggtattaaaactacatgcatcaccttgtctggccttgggtcttgctttttaatgtactctataatctgcttcttgccagaaatgttcagtctatttatgcttaatgtgactggtaatatgaatggatctagaactactgatttgttccatcattgcagacatggtttactttttcttttatgtcttgataatagctactctgaaatctttctctgctgattccagtatctcggctgtcttggggtgggtctcaatgactatattttcttttgaacaaaggtgagcagaatatggcctacaggcttaattggacccagtgactttttttgtaaaattattttttttgctacagctatatccatgcttttgcatctacaatagtgagttgtgtaagctgcaacaaatcaaatgagctaaaaataactgtttatgggaaaaatgttgactcctgcttgagtaacagttacatttcccctttttttcttgcctaaacatagatgcactttcctattctacagaaatgtgttatattctaataaagaagtctgatttctattttcttgtcacatctgtgtatgatgtacatgtgtgtattggtgtctgcatgggtttgagtgtgtgtatgcaattgtgtaacggtctaaggttgatgctgggaaccgtcctccattgctctcctaccttattcattgaggcaaggtctcttgataaaaatccagaacccatggatatagctaatctggctattctgtcttcccagtctgagataaccagcagccatacccacctggcctttacatgggtataggagaactcaaagcactttaaatactaaactatctctccagcccaagcattctagtttttaaattttagtagttatcgtggttcaactcatacttcaaactgtcttaccttggtaggcaacaaagagctgagactcttcagtttttctgccttacctaaagtttggtggagtctatgtgaaggaagaattggagcctcttgcttctggctgattcctaccctcagatcctaagaatggtagctactctgaattctgatttctcaatccaagactctgtgcttctatccaagaaagcttgtctgatgagtgaatactgactggacagttatcatgtaagtagtcaatataaagagaaaattcattccaatgaagtttccttcttcaaatgatccacttggcatcagcttctgtgtgtttctgattattctccagtgccctaagtagttattttaaatttctgtgacttttttttttgagatagaacctcatgtatctcaggctgcccttgaatttattagggtagctaaggacaagcctaaacttcagatccttttgcctctatctcctgtgtaccatgatgatacctatgtatcactgtacctagtgtgatggccattcttggttgtcaacttgactatatctagaaataatcaaaacccaagaccctctgtacatatgtgaaggattttttaaataagttatttgaagtaggaagacctacttgttatgttttataaaaaaaataaagaggaaggaatatgtttggtagaggcgaggtatggtgtggggtaagaccttgcctctgtgggcccacgctgaggcattccttctcttgaaggacctggaataagatagaatagtttattcaggcactggggaggggaattgagagaaaggcagggggtagtagaggctggccatgagcacgtggagagggaggagaggaatgggaagatagggggagcagaagcaagaggagagagcaagagagagaggagggggcaagcagcctcttttatagtgagtcaggcacacctggctgttgccaggtaactggaacagagcctagactaaatgtcaacactacttgtaatctgtattttttgaggtttagggaagatccacctttagtctggccccactttctgttagctgcctatataaagaacaggaaagaaggaaacttaactctctttactgtttgctttctctctgtggctggcaagtccattccttcactggcattaaacttacttctatggaattctgcataaactaataaccagtggagaaacatcaagtgtcatggatttaacaactactggattcttggaacttctgttggtaaacagccattgttggaccagcaagaccagtctgtaagacattctaataaattttatacacacatacatatacatgtgtgtgtgtgtgtgtgtgtgtatgtatatgcatatatatatatgaatatgagttttgagtatttgtttaaaaaaaagtagagcaaaatgggctactttgccactaactctcaagagtttacctcaaaaaaaaaaaaaaaaaaaaaaagagttaatctcatccgagtaagtagtttaagtagtttctccaccctcagcagaagatgtactcccaaccccaaaacctgaattattgcattttctgcctttgactgtgaaaattgatccttcactgactgctaaaccagcagtgatttttctctgaagaaaatactgataatactatgtccttcagggcccaccaatagttgcctctagacctataagtaaactaaggggtaagtaggctcctaaaggggagacagaaagtgtactccatgaggaggtgtactacactactaaagaacttaatgtgtttgctaattcatccaagcagaattctgggaaatatgtgtaggaatggattctaggggtgtgggttaataggtcaggcagcatttactgatttggggaccatcaagtgaagattctaggttagatatggaagactgcacagttagatttgtcaaaagatggcctactgaaaaaggagttgggagatgcctgatatcccttggcttagcattgatgacgggattttaaggttcagggaatttgcaatgctagagtgggtatgctatgtaaaacctaatccttcataatgggaaggcccagaagatatacacttcactgatcctataagacaaaaaatggagagaggggtacaacacatctgaagagctttgttgttgcccatttccttatgccagatcttcaggttagagacattgttgctcatttggattaattaaatgtggtgggtttaattgggccccaaagttgtagggaccagatgggagcactgaattgccaaaggtaaagtgatcatagttatcataactggcagcatagacaccaaggtcagccttggtgaatggaagtccatgttgttgagcctaagcataacccccatctctcccaccatagccactttgctcatgtgtccattgagtaaggacagggatggctgtggaaagagactgactgcccacagaacagggcatactatctacttgcttgattattgagctcctcttctgctgaagtcaccttttgatgagcatttacatgggatacaatatcttcacatgcttccatttggagagatctatccacatctttctcacatggctttctcaccaattttccaatcatgttctttccaagttcctgactattgagtcagtccatcagctcaatccatgaatccactaacaatcacatatctggacatttctccttccaaacaaaatggatggccatgtgtactgccccgagttctgcccaccgtgaagatttctcttcactggggtctttcagggttgtcccagaaagggactgtaaagctgcagctgtccacttctgggtgctgcctgcataatgtgcagaaccatcagtaaaccaagtcctggtgtactcaggtgctaataatagattgatgttgtgcatgtcctactttatgacttggtgggtccatgatgggcaatttaggtcgaatggaaacttggtagtccattgtcaaatgttcagtttccactacagtccaatagcatgcccagagctgtctttcaaagggagagtgtttgtctgcagatgatggtagagccttgcatcgaattcccaaaggtctcttctgccaaagactggatccagacttcatctctatgtgccagtgatacacaagtaccatcaggtctgctagatcatatagtccaagtggtagagtagcctgctcaagcaatttggacctgttgaagagccttctattccagggcccactcaaagctagcagctttctgagttagttggtatatgggctggagcaacccacccaagtgaggagtatgctgtctctagaatccacataagcctaccaaaaatcggcttttacatggtgatggcagggacagatgcaataacttactcttttctttagaatgactatttctgcattcccacattatttgactcctaataatcttattgatgaaaaaggcccttggatttggttggatttatttcccattctcagatgcacatgtgtgttaccaacaagtccaaggtggttgctacctcctgctcactttgtccaaccaacatggtaaagtaatgtgtattttgtggaagagagagaagatcaaggtcccttcaaaataagttatgacacagggctggagagttaatatacctttgaggtaaaactaaaagtatattggcaaggtcagccaactgaaagcaaattgcttctggtagtctttatggacaggtaacaaaaaagggcatttgctctactaatatctgtataccatgttcaagcacttttcaagtccttggtggcactaatttctgcaattcccccagggatgtgttataatttttaactcattgttcccctggcagagacaactctaaaggctcccatttagcttttccaaccataatagccctcaatgcacagatcagggaaccaacgtgagaattttaccaacttttaagtatatctatcccaattgaggctggggaaataaccacaggatgaattcagggacctgctagacctattgtatgtcagacttcaccaaaactccataaattatttgacatccccaagcccttactttaactggaaggacatgatgcttcttggggtctccccaaatcagagtcagtatcaaggttcttccttgggataacttggccatcccttccttcagggagttctgggtctgcataccgtctcaagtctggaaattgggttgtggtacaagactcccttttgctaccatcaaatatataggctatgtttgaagttttttttcccacttatatagatcaaacaaaaattcaataggcttatctatttcatgtctagaaacaccatgactaagtaaattagacagtaccaaaagttcatacaagtcatgccactataaaactcactacagctgaatgtcagatctgccaacagcaagaccaacactgagccccaggtatggcaccattccttggggtgaccagccagcaacctggtggcaggctaactacattggaccacttcctccgtggaaagggcaatattttattcttactggagtagatactcttattctggtcatggatttgcctttcttacacgtaatgacaaaaccaccatccgtggacttacagaatgccttatctatcctcatggtatcccatacagtattgcttctgatcaaggaactcatttcacagccagagaagtgcaacagtgggcccatgatcatggaatctactggtcttaccatgtttctcaccatcctaaagcagctggtctgatagaaagatggcatggcttttgaagatgcagtcacagcgccaactaagtggcagcagcacggaagtcagcaaccaatatatggtatggtatctcccatacccaggatccacaggtacagaaatgaaggggtgggtaaaaggaatagttccactcactattccccctagtggcctactagaaaaattttttgcttcttgttcccatgacattaagttctgctgacctagaagttttggttcctgagtcaggagcgctcctgcctaaagacgtaagaaatagttcattaaactagaagttcaaacttccctctggccattttgggtttctgatgcccttaaactaatagctaagaaaggactaacagtgttaggaagagtgactggttaccaagagggattggactgtttctccacaatggagttaataaagattgtctcaagtgctaaagatccttgagagcatctcttggagctacagtgccccgtgtttaaagccaatggcaaagtataacacctaatgcaggcaggatgataaagggtacagacccttcaagaatgaaggtatgggtcacacctccaagaagagagacctgatgagttcttaacaagggttcaggaactacagaatgggtagtagaggaaggaagctataaatataaggccacatgacagttccagaaattagaattataactgaccttagtgtttctgtcaaattttgttaaaatgtctttgtatatttgcattttctttcctttatttctttatcatgtaatgcaacatcaattaagagaatattagtggttatacttaagtttgagatactaaaagagtatctctcaagggacattgccacctattcaaaaatttataatgcatttggggttgcagaagggatagttatgttagaattatgacctggttattgttttcatttggaaattaagcatgacttaaggagacatgactgaatgtcacattgataagaggtggacaggtggacttgtggtcgatcttcttggttgtcaacttgactacatctatgattaagcagctgggcgtaactgtgttttttttttcataattttatcatttaaagtggaaagagacaccattaatccatatctttgaggtggaaagatacacctttattctgggccacaccttctgctggctgcttatataaagaacatggaagaaggaagcttactctctttgactgctcgtcccccctctggctggcaagtccattctttcactggtattagaacttacttctatgagattctggcatatactaatgaccagtggagacatcaagtctcatggactgaacaactactggattcttggaccttctgttggtagacagccattgctgaactagcaggaccacagtctgttaagacatactaatatatatatatatatatatatatatatatatatgtgtgtgtgtgtgtgtgtgtgtgtgtgtgtatgtgtgtgtgtgtgtgtgtatgtatgtatgtatgtatgtatgtatgttgtatcagagtttttgtaagaaaagtagagcaaacgagttactctgccattaacaaaagcaaacactccacatgatttgttttaaaacagggtcttactatgtagtcctggagcatactatatagaccagggtaatcacatattcacagagatccttcagcctctgtgtctcgagttttgggattaaaggcctgtatcaccacaggccaggcaggtatagcaggtaatttttatgcatatatcctgactttacatcggtagtaagatttctaacagaaaaaaaaaaaaacctgatgcatcaacttttgttaatactgctattagttttataattttatatttttattttatatatgaatgttttacatgtctgtctatgcatctatcacatgagtacttgaagctggcaggggtggatttggatccactgaaactggagttacagatagttgtgagccaccttgtggatgctaggaacagaattaggtcttctgcaagagcagtaagtactcttcatcactgagccatctcttctgtcccttgtaattattttatacatattacaaaacaaagccagtaagtgtgaatattagcattgttagaaatcaacattttcagtgaagaaaaaaaatatgggcataagttaaagactactgaaagctaaaaactgtctttgaaaaaaatctctcacagttatgcccagctgcttaatcacagatgtagtcaagttgacaaccacaagtccacctcttatcaacgtgacattcagtcatatcttctttgatttcgttatacaatcatgatttttttaaaaaaattaaataattttcccagctttgctcacccaaagggtctagatgtgctgttaacccagtaaaaataaatcacatctggcatacacacttggggatctaaataccatttaccactataatgaaccagcgattcttgcagtcaattctgggaccaaaaaagcacatgttgggatgcaatatttggtgttagaaaacaagagaactgctcaaagactagttaataagagtgtgacaagagagcacaggcatcaatataaagagcttcttcaatgtccaaattcagaatgatttgatgacaaaacaatgactgtagctgaattctaaaatttctatttttttttttttggttttttgagacagggtttctctgtatagccctggctgttctggaactcactctgtagaccaggctggcctcgaactcagaaatccgcctgcctctgcctcccgagtgctgggattaaaggcatgcaccaccacgtccggcctaatttttttttttgagacaagttctctgtatagttttggcctggactcaaactcagagatccacctgcctttgcctcttgtgtgctgggattaaagatgtgtcaccatagactggctgaattctaaaatttctaataaataaaacttcaggagtccatcaacatgaaaaacgtatcaacaaatatgttgtcactaataatcactaattctactttgaaatttagtaatcaatccagtaaaaatctgtaccttttgggggagaaatagttcctccttacggataattctttacagagggatggcaactgggagatgacagaattagataaaccataattttgcagcacatagtaaaataatggattcaggtaagaattatgaatgaatgctaaagtcatcaagtgaatacctgttagaaacaaagatatttgtatggtgcttaaaccatgtagattatttgttggttacaacagaaaaattgtacatactccaataaatggaaattaaaaaaatattgagaagtcaggtggtggtggcacacacctttaaatcccagcacccagggaggaagaggtaggcagatctctgaattccaggctagccaagcctacaaagagagttccagaaaagttgatacaggagcaacccaaggttccaaaattaaaaagaaaagaacagaatatatatctctttttttttattttatgtgcaggactgtcctgcctccaagtaattgtgccccatgtattcagtgctcatggaggacagcagaggacattagatcttcctggaactggagttacagacagctgcgggtgctgggaatagaacctgggccctctacaagagcaacaagtgctctcaactactaagccatccatctgtctggcccaagaagttaagattttaaaaagacaacaatagacaaaactattctgactgagcaatctctagaacaatgaaatgaaagacacagtccctttaaatttcagaacacagaggataaagagaatattctaaaaatctagggaaggaaaaacaaaaggaggtcacttatatgagacctaaaataagccagactcagaaagacaaaaacctagcatggtgatcctatccataaaataaaatagtactataaaatagtactataaaaatcttattgcctaaaatcagtgcttgggccactatagacatttcactccattgtcagatgaatgaatgatagtaacttaatgtactgcatatgcttcagcatggaatatgcaaaaagttcattatgtaaaaaataagtgtcagtataaccaagagacctaggtttataaggatgtcaatgaggatgctgtttgacatgtcatccaaagaactgctgtatccatctgagaggcgattcgtggcttggactgagatcttggcagtggaaatgatgagaagcagcttgactcatatgaagtgctattaaaagatggtgaaagaaagagcagaatcaagactgactctttgaatctggattaactggttagatattggtattatttcctaaaatggagtaaagagcagatggaacaaggttaaagaggaagttaagaattatgtttaggactttaagtttaatgggcaactcaagtatatctaaagaactcattacatttgagacttcggaaggtttgggtacaggtagaggtggttccactggcttgctgatacatcatcatttcagagtaatgaaaaggcagaaacaatagaaatgtcacttactgatggcacagtcttgacaagttataaaatgacattgaaatgatatgtggggaccaaaaatagtactataaaaatcttattcagctgttagctaccaatctatggcaaatttatggacaatatctacttttcctctttctatattttatgaaaccttttctatcaagtgcatattatttttatttttggaggcaggaggaccacaagttcaaatacactattatttttagagtaagaaatgcagttgagcttctctttattttagtggaaagagttcacgccatctattttactgctgtgcagaggtatgttaaggaaaaaaggcagattacatgttagatgagctcactccctaaaatgttatgtatgcaggaaggaaaaggaaaactagaagaaagtttaaaatgccaatagcacttgtgatcagaactcaagagacggaggcagaaagattgcaagtttgaggtcagcctgtgcaacacattgagatgtttcaaagaaagaaaggaaaaacaacaaaaatccacctaaaatgtcaatggcataggctattaatataaacttttaggctattaaatattaagtcattgatgtggcattaagtactcaaaacagatttttggattgctgaggtggctcagcaggtaaatgtacttgtacacaacgcaggatagcaaaaacgattcacctagcagagaaagcccggcctcagccttggcataagtcagcaggagggacctggagggacgccaggagaagttctcagctgtgcctctcagcgaagatgtgagaccaacaagtgtggcacaagtagctctgtctgtaagcaagccaagctcgggctccatcactgtccgtagagtcctatttataccctccacacatcacgtatccttcacatgtcttgcctcagcacatgcatctgtctcggctgacaccactctgccaatcattctgagtctgtggaagtagcaagacactgtagcacatcatcagaaggttttggtgcggttctctctatggagttccaacaaatgcagctcaactgtgtaacgtaaggtggaccaatacatgtgtgtcgtttgcaaagaatccttcatcacatgtcctttcatgtgcttgctttagcaaaacatcctttcttctgcgtccatttcaacaaaatgttccttcatgtgattgccccagtaaaacatcatccaaaacaactgactttccaaagaaaccttaagtttctacttcaacacagtgaggcactatctcaaaataaaaagatgaagctttaaatttcattttgtaaaaataaaaaccaaaaaatatttatttttaaattataattatgaagtaggggatagaagtaattaatacacacatgtgagtatgagtatccatagaagaaagaagaaagcatttggagccctctggagattgatttaaaggtagttggtgacccacctaacatggatgctgggaaccatacccaggcactctgcaagagtagtatgtgctatttaactgctgagccatctctccagttcctttgtctttttcgtatacctgtgcttttccctatataactgcttagttgggtactaataccaattgtagaaatatctaatatcaatctagggcttctatcctgcctttgatcatttagttcccagataaaagacacataacttttatgatttacaataagttttaatctgcactagagttgggcagctgtctaccctctatgttgttagaatttattttcctatagataactctgagttattatgtttactatgtttcatctgtgctgttcttaactccaattggccaactctcatgggtatgctttcttgactcctaactcatggtgtctttctcctctctccaccttcttctctctctccttgtggtctgctctgacccacaaggccaggaacaccaagccctgtctatctcaattctgcccagctataggctataggcatctctattcacaaatcagaaataacttgggggcaaggtcacatagcatcacttgggtctcttatctctgggacaaccaggtcttgggagcccacatttagcattacaatatacaataacagaccaaaccacaacagataccttaagttttaaaaaaagatttatttttaagtggtatagagtgaaaacactcatggacgctagagatgttggatctctctggagctagagttacaagttgttgtgagctacctaacatgggttctggggttcaaacttgggtcctctaataagagatatgggtgctcttgtaactgctaaaccatctttctggcccattgataacttattttacaagttttacttatttatgtgtatacccatgccatacagaagtgagaggttagcaggtagtgtcttcctctattgcgtcccagcttatttttttattattttaagggactattttatgtgcatgtctgtatgtacatgtatcatgaatatgcaggtggccaaggaggccagaagaaggtgacagatatcttggttctagagccacagttggttgtgagctgctatagatgctgggaactgaaccaagccctctgcaagagtagaaagcactcttaaccactgagtgttctattcagtatcctccaccttattttgagaaagtgtctctcaccaaacttgaacctcacagactgactagactagctagtcagagggcccctgggatcctattgctttcatctctgccatatctgtttgttggcgatcagaactcagattctcatgtgtgtatatgtatgtatgtatgtatgtatgtatgtatgtgtgtgtgtgtgtgtgtgtatgtatgtatgtgtgtatatatatatatatatatatatatatatatatatatatatatatgaatgaagcactttacccagtgattctaaagttttcttgaggtatttttcaaagtgactggtcatttaattatttatttatgatggggtcccaagtactgaccaaacccgacataattttttaaaagtttattgctgcatgggataataaacacaccatctaaatctccccaccctacctccaagatttcagtattgaactcaggatctcacaaatgccaggcaagcatcctaccaataagctatactttcagatgggtatttgtaaaccccccttttttggccaagaaccctttttgttttctgaattccttctcaggaaatgatttgaaatacataaaatatatagacactgatttatgacaaatttgtgctagaataaaatgcacttctttggtaaatcattaatcagatccaaaggtagaccaaagttacaaacaattatgaacacatatgacatttcaaatatctacaataaatatagtgtaagctgcaaagatttctattctctactggtgataatcacatactttcctggtagtagagatcaaatccagggccttacccatgctgaatatgtgctctaccactgagctacatgacaaagctagagctattcccaacagtactataaataatctattatctacaactgtcagtgaataacaatgaaatgtttcccccatcaaaggtcacaaacccctgagctaagactcaaagcccttaatctagaaatctaaaaagatattccttgtggtactgaggactaaattcaggtctatgaccatgttagcattccactactgagctacaaccttatctctgagcacatgaataacagtttcctttggtgaattatcagaatattttttacttttgttgttttgatttttaaaaataaggtagaatggctatctttgaagtcctggctgtcttggaattcactatgcagaccatgctggccttgaacttagagacccatcttgcctctacctccccagtcctggattcatgtcccaccaggctcagcaggatgtttttttttaacttttgatctttgtacctatatgcattttccaagtttcttactataatattccatttttataatgaaaaataaagagctctgctttgtggggtgatgtctataatctcagcagttgtggaggaaagagggtcagaagttcaaggtcatcctcagctatatagggagtttgagagaagtctgggatacatgacatgctacttaaaaaaaaaccaaagctcaaaaagcttaaaagtatcatatttttgtttgttttatattaatctggaagaacatctaagaaatattatacaagtacttataagcgacattaacattttaaaacacaccttcagggctagagttggctctggctaacaacactggcttctcttttagaggacccaggttcaattcccagcacccacacggtgactcaaaattgtctgaaacttacttctggcttcctcaaggaaccaagcatgtattctgtgtacagatacacaggcaggcaaaacacccatatacataaaaaatattaaaaaaatacaactttcaactgtcctaactacttggattttatcattcccatagttttactagcctaaaaaaaaaaatcactatatctatttatcttggaatttaaaagaacaaacaaaagccaaactgtcacaacttgcagacgtttgtctaatttttttgccaagaataattccaaaaacagctaaaaatattagagcaaattagttcttaatatgctctaataccttctgctgtttacaaaaacacaaaacctagaaacacatggaaccatatattttaaaaataaattaccaaatgtgtgtaggaaaaattagaatacaacacatcaaagcaatgctaatacatacctcaagcaatgtatttttcccttagtagtttggtatacttaatctgttcatttataaggtacaaactaatgaagatataggattatcaggaactggacaaagatgaacaactgtcaattattaggcaagtaagcataaatatatattagtataaactgttcaaatcatttataaaaatgcatcagctatggccccaggttagaggagaataccaaggtattattagaagcctcaagcaagccaaaaagtatttcaagattttcaaaattgacttacatggagaaaattaagattgcgctgccaaagtattaaattcatggtttagtagaaatacagaggttacaaaggagacaaggaggaaagtctagacatagatgcaatttttgtgtgtgtgtggaaagattttataaacatagaaatgtaacaacttctggttaacaagaccaaaggatacaaacataaagcaaataccaatccttgcttctatctaatctattctcagtgaaaactctggttagatttctgttacaaaaatgtttccatagcaaaaggaaacacaaatgaagaaggtctgcaaagatcaatataaccatactttaaaaaagaaaggagttgcatacaatagcatcctgcactgtagaatatgctatatgtacaacacaaccttgcagggaatgtaatgtgtcctgatcaactttagtagactagctactttagggaggcagggaaattaccatgagttggagtttagctgggactgtttctgggttctacagaaggaggctggcatgaatacgcatgcagattgctaacacttatgtttgggtcaaaaagtatgtaagtagctaccacatgtgggtagggtacaagggctaaaaagactgggaaaacaaccacagaatgacctagggagaacagaagagcaaaaagttcagaggatctggagaaggttctagtttcagtccctgaggtcaggttgggagaattagaggactgctgttaacattggctcatcaggatagacctagtccatgacaggaaagaaacaagtttgttcatacacttcctttactatcaaagtcttgttcaaaaaaataataaagcctactatggtaacacacactttttttttgtttttgttttttgtttttcgagacagggtttctccgtgtagccctggctgtcttcaaactcagaaatccgcctgcctctgcctcccgagtgctgggattaaaggcatgcgccaccacgcctggattgtgacacacacttctaatctaagcacttgtgaagtagaggtaggatgactatgactagtaatttaagactagcctcagctacatagtgatcttaaggctagcctgtgctatatgatactgtctcaaaaaaaaaaaaaaaaaccaaataactgggcatagtggttcccaccagtaagtaatcccagcacttggaaaccagaaggagaaagactgctgcaaattctaggccagccagtgctatacagcataactctgtctcaaaaacaaaaatatacacacattaaaaaaaaaactgatggaaatcagtaagggtttaaggctgcaggtatgacttagtggtaaagtattttcatagaataaaaaaatatcaagagaagtatcatttaataccaaagatagcttttgctcctgtacaagctctggactacctcataggctggcactattgagtgttactatggtaatagagaataatgttaatagagaatatgttggaaggagaagccctgtcctacttaagtgtctaccaatctcctgggacaaaagtatggaggggaaggaggttctgtaaggagatctataatgggaaccctggagctccaataggtagaatgggaaggttacagaaattgtccttagagtaagtacagaataaattcattgtggaaatagtacaggataaatggacagagcactgcttggtaactctgaggataagagtagtatcttaagagtatgctgtatcttggcttgtgtgactagtatacagctgcctgaacatcatactacatgccccaaaacgtaagagctcccatcttcaggccccagctgactatgcacacctgcctatgtctgtgtactgagccagacacatattctttcctgcctcagctaccaggcattcttgtctatttttaagactcatcatctttttctactgatgctttctcctggactcagctaaagtttccttactgtgcagatgctgactgccatttaagaaaaagacaactaaactgttctctgcctccatcccataaatctaacttttttttgcttttttttgcgacagggtttctctgtgtagccctgcctgtcttggaactcactctgtagaccaggctggcctcgaactcagaaatccacctgtctctacctctcaagtgctgggattaaaggcatgcaccaccaccgcccagctaaatctaacattttatgtgctctctcagtggcagacactcttcacaatcataattgtctaccccttggaaaatcagagcccatttgcccatccgtacctacattaggccagggtaaggacagtcccagtagttagcacacataacagatgctcgatcagtagagatcacatgaataaagtactgctatatacactacaacattcataaataaataaagcaacagcaacttggtcccaaatacttacaggatattctttgtgcaaattaaaacaggatgtaggcagaaggtccagcatctgagggatactctccagccaagaatccaaaggagctaccacaacttagaatggtccaaaataaaaaaccatttgattttcttcaagattcataaataggaactagctgaaattcccctcatcaagtaaaatgtcttgcctgaaatgccctgcttacacaagatcatattttatgaaatggaagcctccaaagtttggtttctagtgctaactgctaaaaacaacttcctcctagcccaactacactctaatctctaaaaatagtactgtagtcataaattcgtgtatttatctatttatagttttccccctaaaagtctacaactaaatggctacccctttgttcagaaatactttgaaaatttaaaatgtatatatcctttgatctagcaagttccacttctagaactctatcttacagataaacttgcctctgagctaaatacaggaaaaaatgtatagtatagtggtttgaataggtttgagcactatagatttatttgtttcaatgcttggccttatggagtggctctattagaaggcagggttttattgaagtaggtgtggccttgctggaagaagtaacatcactgtgtaagcaggctttgagatctcttatactcaagctctgcccaatgtggaatgagtctcttcctggttgccttctaatcaatatgtagaactcttcttgactccttctccagcaccatgtctacctgtaggctgccatgcttcctgccatgattataacaaactaaacctctgaaactgtaagccagctccaattaaatgttttcctgtataagagctgtcatggtcatggtgaccatgcaataagccctatttaacagcaataaaaccctaactaacacatagagcatcaacattttgaggtagataaggtttttctatgtagctctgaatggtcggaacaggttggcctcaaatctgcaataatcctattgcttatgcctcccaagtattggaattaaaggtatgtgccaccataccatggtaggataaatgacattttgacaattagaaacacaaacatccattaatagaaaatcaaatgtattatagcataccccataaatagactattttatttcatcagttaaaaagaatgatatggttctgtataaactaattccagataatcgccaagatacattaactagaaggcaagctttgcaactatgtgccatattttatggttcaagtaaaagatatactcccacatactttttgtatatgtgtaaacatacaaaatacataaaatgcacatgcataaacattcagagtaaggcactagacggtattgacagccagtaggagagtgttttagcaaaggatagggatgaagcaagaagcgaaaattagtcttcagtgagcatagaactgcagcattataaaagaaaagagatctggatgtggaaggcaataataataatttgaaaactgaatgacaagtttaccaaagtcaaactcaagcatactccggaaatcatcccatctcaaagttaaatataaaaaccagtatttgggaaaacacagggcaatcttaaggggaaacaggtaacatatgacatgaaactagagaaggggtggtggtggttctgtagtgaggaccagaaggataaggcaggagaacaggaaaaggaatggggaagaatgagcaacagaacagagtatatatgaaaataccataataagaccatcatttttataagctaactttaaaaactacctaagggctgcatgccactaagcctaatgatccattagcctaacacacacacacacacacacacacacacacacacacacacacacacaattttaaaaaccaatttaagggctggtgagatagctcagcagttaagagcactgactgctcttctggaggtcctgagttcaaatcccagcaaccacatggtggctcacaaccatctgtaatgagatctgaagacagctatagtgtacttacatataataaataaataaaatcttaaaaaaaaacaacttaaaaaggaatgtggacaaacaggaacttatgatacattaaatatgtatacattgaaaatacatcaatcttttcagaaaaaaaatggaagtatcaactaactcctagaagaaaaagattttcctgtataaaaaattaattttatgtgttttgtatggtgtaagtttatgtaccacatgcatgtgtgatgcctgtggaggccagaagagggcactggatctcatggaacaagagttacgtacccttgtgagttctggaaactaaatccaggccctttgcaagagcagcaagtgttcctatgttcttaaccactaaacagtatctccagcctccagaaaacactttctaggagcaaatgaaatcttaatttttttttaagtgtccatgttacatgtgtgctacagtctaaagatagcttgttggagtcaacaacttcgaggagttggttctctctttccactatatggcttctggagatcaaatttaggtcactagacttgatggaagcatctttaacccactaagctaatcactgggctgcctgagattttatataatagaaggacaaacaggttaggtattcagttcagtagatctagaaagtatagctcctggcttcttacagacccacttaaaaagaagtatcttgggggctgaagagatggcttagaagtcaagatcacttgtgactctggtagaggacctgtgtttggtttcttaacagtcatgtgaggtagcttacaactgtccataactataactccaagaggatctaccactggcctctgtaggtgcctgaactcatatgcacccctcatcttccgcgtgagccccacagacacagaaaaagaattaaacacacacacatacacacacacacacacacaaagaattaaaaattaataaaaaatatcctgatggaataataaatacagaacatgaacatatagttcacataggccagatacaaatggccaataattactgagatacagctcagtaataacaaaaagaacactgatttaaaaaataggtatctaattatgaagtcccaagaatttcagaaaggtgatacctaccagtacctccaagtctaggtagccattcttcaaaatgactagctgatgaagaagttctaatttaaagtttatagggtttttttttttttgatacaaggtcttgctatgtagccttggctagcctgaaacttgctatgtaaactaagctggcctcatgctcacaaaaatccatctacctatctctgtgtcccaagtgctgggattaaagttgtacaccaccatgcttggctttttcttttcctttttttttttaattaagaagaaaagatatacatttttctagaaaaaagttgtattgtttgacctgaaatggttgtttttctagagaaagcagccaaggagctgaaggggtctgcaactctataggtggaacaacaatacgagctaaccagtacccccagagctcatatctgtagctgcatatgtagtagatggcctagtcggccatcactgggaagagaggcccattggtcttgcaaattttacatgccccagtacaggggaacaccagggccaagaaatgggagtgggtgggtagggaatcagggcggagggagggtatagggaactttcgggatagcatttgaaatgtatataaagaaaatatctaataaaaataaataaataaaagaaaaaaaagactttttctaaaaaaaaaaaatccaccctttctctggagaaacatgtatagtatcattactgtctttttcccagagtcattcataaactgagaaaaagactttaaaaaccgcaaaccacgcccagcctaacatctacccatcagtgcttctattacatttagtagaattcttgagacaaagcactagccatataactcccaccagcataaatgtgtgaagcacaaagatcggtcaggtctggatcatacctcatgacagtgaggagaatgacaactgacgtcacagtatcagaagcagaatcaaatcttcattttcttctattctcctccacccaaaacttacccccccccccataaatcagctatgtgtgtgtgtacatgtgtgttgcgtctgtacagtgtgtaatacatttagagatacagaaaatgctaactggggatctctgctacaatcaaaacacagcatgtgtgaacagtcaacattttcttttgtagaagataggaaaagtcaattggcattatctgttttatcacacagaaatacaggtgacaaactatcaaatgtagaataattactaatttaaaaaaagcttgagaggtttgagcctgataaaggataagaaattacagaacaagtcattcttgcaaaaactaaagtccacacaatggtaccgcagtagttcacagtacagatttgtcaggtctgaaaaacaactgggctttccagcttttcctgctctagaatcccgagagtcgcacatctgtctggatgcatccatcagaggtcagcaagcaagcaccactaaccacaggctccattgtgccgtgacactttcagaaaggtgctcttctaaggggaccacataccagttcctatatctgaaaatgcagcacaccactgcttgctaacatcgacctgcaagtcatttagcccaaaccaaatcaaagaaagcatcatgctgaagaccactaggtaagagcagcagcacaggtgaagagctcaggccaagcactctcctgcttcaaggtgaactgaagctgcagatcaccagttccagctctaatctgacacccaccccccagatcacactgtggctaccaagtaactctacccaaactgaactgaactttcagggctcagggaagtgacttttttttattatatggcacagtttggcccagttatattttttgtctttggggtactttcatactgtccaagaatagtatatctttttttccttttttttttttttaaaaacagatggccaaaccaggacatatactaaaaaaaaaaaaaggaaggttacttacctgagccctaacatcccagctaccatggaatcctgttggagctggtctacagaagcaaggtgtattctggggagtcacatgtcacatcaaagcaggaactggtgagtctgtatttttatggagcctaaaacaaagaaaatcgtaagttgaaagtccccattgagctgcaccttttcccaaggctttttggaacattctgaagataaacagacaacatactatgttacttcccagctcagctagttagaagcaaagaataaactgcaaattactgccacaaaacacagaatgctaaaataaagacaagagttatggctgtcagaagcgtcactatcagaggtccttacacctctggggaacactttggaactacagtgcacaccacaagtggtgacttctgcttaagtacttcttccaccacactatacaggaaaagtcaaggatagaatgtgttcaagagtatatgcaacatcaaaacaaaacaaccaactccccccccaccccaaaaaaaacaaaaaccaaccaaccaaaaaccaaaacaaacaaacaaaaaacccaaacacccacacatcacctcaaaaagaacacaaccaaatccagaggcaaaagtctctcttctgcttccagcagtcaaagctgcaaggaactgctctaacatcacaaaggggttttcaccctgagataaaagacaaaacaccaggagatccaaagccatcatccaaactataagtccttctctaaccaatttctgtaaccctctcaattcagtacatctcaatggctgtaacacagagttgatgatccttttgacctttttgttactgtttttctttaaaatttttgagattttatttatttttattttatgtgcatgagcatttgtctgaatgtatgtctgtgcactacccacatgtagtgcctgctgaggctagaagatgggtcctggggactggaattagaccattgtgagcctctatgaaggtagtggaagataaacaagtgctctaaacagctgagcgctctccctccccccattgttgtttttgaggcagtctcgttatgtagttcaggctgtcctcaaactcagttcttccggcttcagtctctcgttttttgtttgtttgttttttttttttgcacacatgttcaaataaggctgttgccaccaagctaaccatcgtttcctagttaaagccttagctacctaaatacctaattttagatacctggctctcccagcaataacacttttatctttacactaaaagaaaagcttatactatacaacttaagtctattatagtcactcatggggttgaatccagaggaaaggcaacagcaaccaagtcctttgcagctgtatgctatttacctagacgatgcttacagttctcttttaaggctcagcaaaacctcttcatttctataatttccttaaatcatagaattaagtcatggaacagtttgaaatcccaaagttaattgttttttggatatcagcctaataaaaaaactcaaaccagtgccttgtttataagaaggcctgcaaagtcacaacttctcaagactagttttacctacctgcaattttatttatttatttttttgtaaggatggaactgaaatcagtgccttgagcatgtgaagcaaatgctctacactactgactgagccctatatcttcagcccttatttcactagaagctgaactcagctttattctaagctcttaaaaaagtttgagatttgatgaaaaaaaaagttaaaaatgaattcagttaggtgaaaatccaacaaaaatattcatactaaaataccccctgcttttaggaaaagataagcacacttttactaaggcttggccagtaacaagagtccagacatccatagtaccagctaggtgagcagacattcacatgctagcagtgtccaggaaaaggtcatatttccccctttaacatgggagtaggctcgtctgccttctcttgagtcttgccaccattcagacattccacacactatatttcccataaaagtgattgaaatcaaactttcaaaggaaaatgttccttgggagagaaaggcagaagagagctgtagaaagcagaagagcacacacacacaccttctgtataaactagccccagaagtagggagccactggactccctgaaatgatgagcaggtgcagcactctgattggacaacagcggagtgattaaaaatggctgtgatgggcactgaggacaatgtccttcccttggaagaacaatagtgttttctacccaactaaaaagattgtttctgttagccacatggcttgctgcacagatgttaccagagcaggtgattaaaatgagatattctgccacacttcctggaattctctagtctaggctgcgcttaaaaacactggctactagaaatgtcattgtccatcagtctatgcttcccagaagtagttcactggtggtaaactgctcttagccaattaaaacattccccaccgagtgacctgtttttgtggaactcccatcagagggagtggggagctctgtcacttttggcatccccttcctcctagtgggctgccttaatatgagggaaggtgactagtcttattgaaacttaatatgccatgctacattgatatgcctgggaggcctgccttttctaaagggaaaaggatgagtggatggggaaggagaagggaggagtgagggactgagaggagaggaggaagtggaaaatacagttgggatgcaatatatgagaataatgaataaaaaaaaaagattctcactgacaattacctttagaaaagataacaggttccaggatatatcatttaccatgcaaacaaactaacacgtttacctctgctgctctttattttaggtttaaaaaaaaaaaaaaacttctcaggagttcatgggtggagttggggcactggaacaagggtttagctgatttctccttaaactccatagctttgcctccctatccccaatagattaggcttcatagaagcagatcaggtagagtgaaccactctatctggaaaatacacagattgcaaaaacatatcataaccttccaaaatctttgtggtctatgtgtagtctttgtggtcatatgtacctcaggagtcaaacagcacaaaaaacagagtagaaggctaaggatgtggagtgattgcctagcatgcatgaggtcctgggtttgaccaccagtataacaataacaaaaaaaaaaaaggaaaaaaataatccttagagtacaatggacaacatgatgctttcttcttcagtgaaatagtgacctgttactgtagctttaaagtactcaagacacattctcatggaaagaaaataggcatatgtgatagatcaatactagcaagaaagccatacagtttcttcaaattcttaggacacactagcttcagatgtcaccaggcactttgaaaggaaactgtgttctagaagttgcttacgatgtttaaagagctatgggtacaacaaatagataaccagaggggcacctgaggaagcaaacctgttgtaagaatataaaaacaaagtaaaggttccaactctgagctcaggctcagatgtacaaaccttggaattttttgacaagcaagacttgggtgtgtttgtgaaagtgaatgcactctgtcggccatgtgtattaactcattttagatcatttgtacttttacagtgtttggactctttaaggttctgacatatccaggtaagaaaataaaagcaagtgtttcctaggctttctgagtatgacttgaatttgaagttaaaaacaaacgaaaaaccaaaagtctgtaaatatatttttccaaatccttggtggaaactccccaaggacctaacaatccaaattttatctttttatagagattcgacatatttcaaagaacctaagatatcagtttaatcatgttattaattgaaattgctgagattcacataattccaaccacaaacccaaaattctcctctacagtaataattacctattagtgaaattttactacccaggcccaaattggtttcatttatgtagtataacaaaatatctagaacttgtcctacaacatctcagtcacttagcactataaattagtccattctgtttcatgatcgtcatcaaccaccctgtatttgagcctactgcctcactgtaatgattccaaacagtggagtcaacatgcaaatgactcaacagagcccatttgtgttcctggaaaattaaccaagagtacatatctgcctgactatgagtcaggaatatcaaatttgtggtggagcccatttttgttttgatcaacctatacccgaacatacaaggaaccagcatagaggtatcccctaacaagctttgcccttcaggggtccatactgaacaatgtcataccagggtctctcttgtgagagggaatcttttttagactccatgatgactttaaacctttagtgcaaaacctcagaaacattgccactgccacataaaagtcacctgtgttttattttcagtgattcagccataaccaaactaaaaagagaatgaactttcaaagataagtgacaggagtcacagcgatgcgatgatctcgccccatttggtactggcgatcctgagcgctccaggacgaagagagcccgttacatacaacgtcccattccacttatgtaactggatgatcgctggcgaagggaggggagggagggtgggaagacgctcatattccgaagccacagcacagcatccccaaagaaccagagcaccctgcgggcatggtctcacggaagagcttcgagtgctgaggaacgcacagtcccttgcccacggttcctgatgagaactacaaccatctctttatgatgagttgtgggacctaggaacataatgtctagtcctttttgtgggtggacaataaccctcaacttgttcctgccaagtggggaatggagctgatggaccgactcgcttgcagtgggggcaaaaagtcacggaatgggagaggaggaggagggagcaaaacccagagatgggggtaagagctcaggagcccttgtggcgcactctcccaacgggagatggactgcgcacgcgcgccagtctgtgtgtgtgaggggggagcaagtaacgggagtgggggcgcgcgagggagaaggggacagcgcgatccagggagaggccgggaccgcgggcgcgcgacagtgccgaggcccaaagccccaagaagggcaggagcgcgcgcagccccaactggcgaagcccagacgacaagggcgcttgcacagctggggcctaggatgcgcacagatggggcgggcagcgggagggcgtcattcgaaggtggctccagggagatcgcgctgagaaccgtcgctcgcgattgcgggagacgagtggagaaagccaccaccggcggcagagggagggggagggtagagaggagggacgccatccgccagccgtgtcgcccgaccccgcgggcccctcccgcgccacgtcccgcccctacccgccccccagcaagggtccccgcccgcggccttggcggtcccactcacagtctctcctcctcgcctcctcctcctcctccgctcggcgcggcggcggcggcggcggtggcggcagcggcggccattttccggacgggttttaccacagccctctctccgagaggagggagcgcgcgcgcaaccgatgccgggaccccgcacggcagacgtcgcgccccgccctcccgaccagcctgtgtgctgctgcacctgcgcgcccgcgccccaccccttgctctttgtcgagattacccttcattggttgtggagcccaggctggggcggagccttagcggtgacgccctcaattggcaggagttcctgtctgtttaggcagggaaaagaggcggaccccattcagctgcggattggtggagttctactgtcacttggaaaaaagaggcggctagggcacagaggggctggttttgtgggcagcatttgaatgttgaggattaactgggcccttgtggactctggcgcttaaggaagtctaggctcttggcgcctattagagcctccctgctgagtagttcaccattgtgataagcatttgacttcaccagcatttctttattatcattttctgtagaagtagcaaagttgcctgttgaggagcctggcgttgttccaagccaagggacttgttttaaagggtctactgattgtattattacactaaattagcagatgtcgcactcttaaggctgacagtaaaatcaacatatcaaaccttggtctttgcagacgtttataatgggcagatggtgtgtgccaagcccataagagatcggtctgtcattgttgaatcagatggtttgatggaagtacgtataaaagggagtgaggccagagggagcattgtcaaagcagccttaccctgataccagtcagcatccaatgctctttgtgctaaacaaatgctcaacaagagactttctttctttgtttgttttttaaacactatgcaacaagagactttctgattcaaatttggctcccctctctattcatttatttgctaggcactgttttagtactgaacaaggagacaaactagactcctggtaaggaagagtcatactaaacatacaagaaagtagaacttaaaattttgcacagagataaagactttgaaatagatagggccaggacaaaagaagtgctattatgataccctctagcttttgccctcatgtcatctcccaatatgggtaattggggaaaacattctaggcaagtttaaacactctaaggaaggactatgcctgccttactaaggaggccagtgtgactggagagagacctaggccaccaaaagaactaggagattattttgagatgagaagcccttgataaatatttgagtcactagctgtcaccataaaacctatgttgccagtgaagaatgaagaactggctggtccagaggtcctggcagcagttgaagaaagatagatgatgaaggctttaaccaggacagtagcagttgaaatctgataagttgtgatagttaagatttatgttaaaaattgagccaaaagtattggatatcagatggaaagaaagaaaaaaaataaggatgatggctgactttgggacaggatcacctaagtgaatatcttactacagtgggggaaatctagaggatttcccatatggccattctaaaccatttgtaattctagtctcagggaatcctgtgccctcttctgaccacagtgagcaccaggcaaaacacttatacacataaaatactaagatagaaatgtaaaaaacaagtgggtaagagtggtagtgtgtgtgtgtgtgtgtgtgtgtgtgtgtgtgtgtgtgtatgttggggtgtgagaatacaggtatttgcatatacagagaataggatctgaacttgggtcctctgcaagagcaacaagccatctctccagccacaccttcaggctgagttttattccacgaatgcaaggatggtttaaaattagaaatcaattataattttaagaacagatcatgtgagtatcccaatacatgcaggaaaaagcatttaataaaattcaatacctacatatgattttaaaaacaccttaaagaactataattagaatgtccttaatctgatcaaaatgtctataaagctgtagaggaaacatgatatttaattgagaacaaagcaagaaacagcaagatctacagtgcaatatcattcacaaaaataaagtacatcattttcctaccttgtgaaattttgggaagaaaatcttaagttccttaaattagataaaagagatttaaatgacatattttatacttgcactaaaaaaaaaaaaaatagaaaaaaaggcatattgtaccaaaagtattttagcagtagaattaaaaggagccatttaaaaaatgagagtgtagcatttaaaaataatattcctttaaaatggggagatagagtctgaggataaaacgtaatggtagagcacttgcctaccactcataaagccctggattcaatccccaacataaaaagtggggcaattacaaccaggaaagtatactacatgtatatatctcaacaaactgaagaattttagcaatatggaaaatagaacacacacatccactctatccaaaaatctgtgggagtggtgggacattttttttttaattccaaaatgacaaagaaaaatgagaaagatgacacagttcaaaatactgaaggcacatcccatatgatgctacacaagtataaacacaatttgacttgaggatacttatgtaatatctcccaaaaccattcatccatcatacacaccaatcaagtgtcccagaagctgtaagtgttgctcaatggtaaagtgtttgcctagcatgtacaaagccctgggataacccgtagcattacatacacctgtcatggtggtgcacaattataaggccagtacacaggaagtaaaaggcaagaacatcagaaattcaaagtcatccttggctacattatgaattcaaagccagcctaggctacatgagatgctgtctcataaacaaaacaaaacccaatctctttcatacaggaaaacatttatattcataaaataaaaataaatacacatttaaaggtaaaatagaaaaagacaataaattatgcttgcatgtacatgctctcaaagctttccttttttactcttaaaactactcaaaaaaagtaccatggctggcacgatggacagtgtaaaggctcctgctgctaagcctgatgacctaagtccaagtcccagtacctaaaactgactcccataaattgtcctgtgacctttattcacatacttgctatggctcattctttccttctccccaatccaaatggatggacaggcagacagacagacaaaattttgcaatgaaagaaaagtgcctaagattaaaaggaaataaagaaactttggtgaaagttctgttggcaaaatgcttgatggtgcaagcatgagaacctgatttcaagccgggcggtggtggcgcacaactttaatcccagcacttaggaggcagaggcaggtgggtttctgagtttgaggccagcctggtctacagagtgagttccaggatagccagggctacacagagaaaccctgtctcgaaaaacaaaacaaacaaataaacaaacaaaaagagagaatctgatttcaatcttcaaaacttttttttttttaaatctgaacatggagccatgtgtttggaattttgtaattccagtactggggagtcagaaacaagcagaatcctgaggctagctggctagcctaacctagcctacttggtgagtttcatgcaagtgataggcccaatctctttaaatcacctttaaatatgatggatgtggagggcatgaagtctctgtgctcatagacaaggaatatagaaaccagggatgtgaagcatgcaggcaggcttgtctcttcaacagaagggatgtatatgcctgttttccacccagaaggctgggagtggattttgttaatagcctggtggtctgcgccacctgtgtggtcaggtcacacccaaatcccccctcccccagtttatatcagactctccctccctagaccttcatccgcagttttgttctcagtcagtagactgagatgtcaacaagtattttatagcctggtgacctcaacactatctgcatgacagaaaccacaccagatcctagggccctaagctgtagaatgcatcctcacggtagaggtcacctaaactttgcaaaagactttccatgtagttaggcccaaatattcattttccacacagaattgagaaaactgtaaccagggaacttttctttcccaaaattgcaccatacttaaataagtttaaaatcaaccgcacagggtcagactagaattttgaaccaacactggctaagacagatttcctttctgccccttgcagttcatttccctgcagtagagcttacagagacccccatgatggttcctgaggtccaacactagtggttgtctcctgtctccacatgtacatgtagacatgcatcaatatccacatatatacctgcatacacacacacaccccacgagagagagagagagagagagagagagagagagagagagagagagagagagagagaatgagaatgtagagaagaattatttgaaaaatacggtagctggaaaaatatagctgaaaatatttgaccaggcagctgcagaagagatagggggcagtttgcaggttaaacaacaaagagtctgaatctggaggcacgttatatacaaaaaatgaaataaaacaatagtagacacacagggattcagtgcaggatgatggtttcagttggaacacccctctccccaagcagacagctgagctggagccaacaagggcttaaagagaaaacatctggctgttctataaagaagctgaacatctgtagagagccaaggcttccagcatggatgctgacaattcctgagtaatttcttcctcattttagccagtagactctatgatctccactcttccagcccctgccctcacagaggtcgtttggatcaggaaagcagatctccaacagaacattaaatccacaatagctattgaactcttctttattaattataaataattactaagtaccataaaaaattgagagaaagagctcggtgtggtgtcttatacctgtaatcctagcactgaggaggccatgaggcagaagaatcaccacaagtttcaggtcagccagaggtatattgttagaacctgtcttcttaaacatgaaaaagaaatagacgggagccttccatacacacaaaaattcaaggtcttgtctaaaatgtacaaaacactggctttaatgcccaacactgaaaaaaaaacacatattgcatctataaataagaacagaacattatataatagagcattcagagacaaaaagtaattcttaaaaagaggagaaaaatgagaactttgaggagtattctggaattcgagagcttaacaagaatttgaaaattaaaaactgagcaaaaactacaaagtctcagattctacgggagtgagaggctcccaggatccaatggagatgactttagccgaaatatccaacaaaggggggatacaacctgtagagaccacctccagtagataagcatggcccccagttgggagatggggccacccctgcatctcaaaacttttaactcagaaatgatcctgtccaaagaaatgacagggacaaaaaaaaaaaaaagcaacagagactgaaggaaaggacatccagagaccaccccacctagagatccatcctatctgcagacaccaaacgtccacactactgctgatgccaagaagtgcttgctgacaggagcttagcatggctgtcctctgagaggctctagcagcacctgaccaatacatattgagatagagccaatcattgggttgagtctggggaccccaatggaagagctagaggaaggactgaaggacctgaaagggattgcaactccatacaaagaacaatatcaactaactggaccacccagagctcccagggactaaattaccaaccaaagtgtatacacatggagggatccatggctccagctgctatgtagccttatctgatatcagtgggaggggaaggaggcttgatgccccagggtagggggatactaaaggggtgaggcaggaatgggtgagtgggtagaggagcaccctcatagaggcaaaaggtgtggagagggggtatgggataggggattgtggaggagtaacctggaagggggatatcatctgaaatgtaaacaaataaaatgattaataaaaaacaagtgaaaaaaataaaagctgaggaaaagaaacagttatgagactagcaccagacaaaagttaacagggcaactagaacatagacaatagggcaaagcttttaaaattgtaggagaggcaatcaagtgttagggatccctttctgatccaggaggttatttatttctcaataaaaccttgcttgttaccccccaaaaattctaaaggaaaatgcttgtccataagcaatagaatcatgtacaagtcaaaatatttatcatgtataacaatgaaataaggagttatagagatatatgaactaataaatttctctcaaatacattttcttaagaagttacttgaggatgttttgaagcaaaacaaagatataagccaaaaaagaagtggtgggatccacaaggtgggggttcacagggatgccaactgggcagaaaaatgacaaactcagtgtgtgtgtgtgtgtgtgtgtgtgtgtgtgtgtgtgtgtgagagagagagagagagagatccaagaattaaaaacaaattagctatatgtttgtgaattcaatgttttagaaggtgtgattaagagtttgaagaagctggatatgggtttaggatgtggtttggttaggagactgcttgcctaacatacaagaaaccttgggattgatccccagtgccacataaactgggggtgatagtatatgcctgtacagtacagtacagcactaagggtgtggagttaggaggattagaagttcaaggtcattctcagtcttagaacacaccaagatcaatatcattagcaaagcaaaatttatcataattttctaatttatggcacataagaaaaaatagcataatgggacagtgctatcttcttaagttgtccaggagtcatcaaactagactcgtgaaaatgcagcacaactctaacatgtctcctcgtccttttcctttctttcctcatccttcttttagttgagatgaggtctcttcagtctatacccagagtggtctcaaactgacagcaatgcttttatcctcagcttcccaagtgttgagactacaggtgtcagccaccattcccagccttatgtggttatcttagttgtggtaaatttaaacaacacactttaatttctcatgccactaactttcaatatcaatattacatttgacagttttgtatcagctagacttcaattttacattgttggggttcatatgtaaaatatgaaaagataatcaccaaaaaaaaaaaagaaaagaacagaagaaagtagaacaaaaggatattagagtttgagagaccctgataaatgatacccatttttcccactgagttgtagtggaacttaataagcaaacacacacaaagttcagctaaaaatcccttatttaaaggttcttcagtaaacacaagttcagtcaagaagtgaaaccttcctttaactagataatttaaaatgctatggaaatacagagatgaaacaaatccaggtttgctgtcaaaacagacagccaacagaaacacatggattcttaaagggagccaagtacagtgttgagcagctccagcagcttgttggccagccctgcttctattccctcacccactcattttcttaattcacagaaatgtggcccaggacctagttctagccaatgaaaggtgagggtgagtagactgggggatttggggaagctgcagctgttctgctccccttgatcagggtgagcctggagaaggcagaggatgtctggccataagtcagttagctaccaaacacgtttttgaggtcttgtgagattagatatttcatcaatatctgctattttccagctttggtttaaatatttttttctctggttattgtttgttttcttgcttgcttaggttgactgctactttctctttatgttttctttttatgtactcaaagaaccaagtttggtattaattttcttgcctctctctgtttattgacttggtacttcctctgctctcacagttccagtgttctacatattttcaaactttgattgttttcaactgaaatttaaatctaattctagtagatcccctttttgttcattgtttcttttctaattttgaaacttcttgagggtcatttttgggccttaatattagtctctggctcttctatgaacccccttgccactatgctaagcaagatctactatctagtgtgggccaccctgcaggatatgagagaggtgaaggatgagttttagagtctttatttgcctaccatgcacaaagccctggatttggtccctagcaccacacaaacagggagttgtggttccagctctccagtggtgaaagcatgaagattagaaactcaaggtcatccttagctttgtttttattttgtttttagatttgtttttagagtagctgaatgttgataaaattgagaagaggttaatgaaaattcccatgtaccttctgccccaacaagatgcacagttccttcattatcaacacccattagagtgagacttatatattcaatgaatctacactgacacgtcattatcattcagaatctgttacagagcactgttttaatgtgtgtgtgtgtgtgcgtgtgtgtgtgtgtgtgtgtgtgtgtgctggttagtcttatgtcaacatgacaagctagaatcatcaaagaggaaggagcttcaattatgaaaataccttcataagatccagctgtggacaactgtgtactctctcagtgagtggtgagagaatggagggcccagcccattgtgggtggtgccatctctgcactagtgatcttgggttctacaagaaagcaagttgagtccatgctttcagacaagatcagacacatttgccttgatacacgtctctctgtggaaatgaagctcatgagcaagcatctgcatagtagaacttggcctgagaactgtcccctgagcaccactgtttagatctagtcttgctccttggtctggagaagtcacacaggaccccaagagcatcctgccttcctgtggaaacctttgggggccccaaaactaaccagcttggaaccctgcctgaacacccatcctagttggagctgcctgacaccctagctgggtctgactgggacacaccctgtagagtagtaaccactcaagaaaaagcctgcagagtggtgtctgcctgagacacagccaacagagtagggtatcctgacctacattttctagcctatggcttcccccacctcctcatgaagtcctgctgctatcaggatcatcctgccagtaccagggaaaaccagatgcctaaaggacagtgtaagaacacaatcaacaagactcaaggcaatatggcatcaccagagctcagctatcctctacagcaaaccctagatatcctaatgaaactggagcacaacaagaggatctcaaatccaactttataaagatgatgcaggcctttaaagaggacataaatacattctttaaagaaacacaggataatacattcaaacagatagaggcattaaaagaggaagcaaggagctagagagatgactcagcagttaagagcactgactgctcttccagaggtcctgagtccaattcccagcgaccacatgataatgggatccaatgccctcttctggtgtgcctgaagacagccacagtgtattcatataaataaaataaataaatctttttttttttttaaagagaaagccgggctggaaagatggctcagtggctaagagcactgattggtgagactaggccggggcctagcaaacacataagtggatgctcaaagtcagctattggatggatcacagggcccccaccaatggaggagctagagaaagtaaccaaggagctaaagagatctgcaaccctgtaggtgcaacaacattatgaacgaaccagtaccccggagctcttgactctagctgcatatgtatcaaaagatgggggctggtgagatggttcagttggtaagagcacctgactgctcttccgaaggtccggagttcaaatcccagcaaccacatggtggctcacaaccatctgtaacaagatctgactccctcttctggagtgtctgaagacagctacagtgtacttacatataataaataaataaatctttaaaaaaaaaagatggcctagtaagccatcactggaaagagaggcccattggacacacaaactttatatgccccagtacaggggaacgccagggccaaaaagtgggaatgggtgggtaggggagtgggggggggagggtatgggggacttttgggatagcattggaaatgtaattgaggaaaatacgtaataaaaaatataataataaaaaaaagagcactgactgctcttctagaggtcctgacttcaattcccatcaaccacatggtggctcacaaccatctgtaatgggatctgatgccctcttctggtgtgtctgaagagagcaacggtgtactcacatacataaaataaataaatctttaaaaaatgaggaagcaaataaatataaagaaatatgagaaaatacaatcaaacaggtgaaggacatgaataaaactgtccaaatcctgaatataaaatagaagcaataaagaaaacacaaactgaggcaatcctgaagatggaaaacctaggaaagagaacaggaactacagatgtaagcatcaccaacagaatacaggaaatggaagagagaatctcatcaatatatcactcaaagaaaatgcaaagtctaaaaggttcatgacacatccaggaaagataagacaacactgatcactctccccatatctcttcaatacagtacttaaagttatagctggagcaatgagacaacaaaaggagatcaaggggatacaaactagaaaggaagaagtcaaagtattgctatttgcagatgatatgatagtatatatatatatgtgaccccaaaaattgtaccagaggacttttcatcaaattggctggatacaaaattaactcaaaggaattaatagccctcctctacacaagcgataaatgggctgagaaagaagttagggaaacagtactcttcacaatagccacaagtaacataaaataccttggtataactccaagcaagtgaaatatttgtatgacaaggacttcaagtctctgaagaaagaaattgaagaaaatatcagaagatggaaagatctccctggctcatgtatcagtaagattaatatagtgaaaatggccatcttactaaaagcaatctacagatccaatgcaattcccatcaaaattccaacgtaattctttacagaacttgaaagagcaattctcaactttatatggaaaaacaaaaacccagggtagctaaaatgatctcgtacaataaaagaatttctggaggtatccccaccccctgacttcaagctgtattacagagaaatagtaataaaaactgcatggtattggtatagaaacacacatgatgataaatggaatcacatcaaagatccagaaataagcccatgcatctatgggtggttgatttttgacaaagaagccaaaaccttataatagaaagaagagagcatcttcaacaaatggtgcttgtctatctggaggtctgcctgtagaagaatgaaaatagatccaatatttgttaccctgcacaaaactcaagtccaaatgaattaaaggcatcaatgtaaaaccagacacaatctaatagaacagaaagtggggaatatccttaaacttgtcggtacaggagacaacttcttgaactgaacatccatggctcaggcactaaggtcaagaattaataaatgggatctcatgaaactgaaaagcttctgtaagtcaaaggacactgtcattaagataaaaggacagcctacagattggaaaaagatcttcactaaccttacatcaaacagagggctaatatacaatatatatattgaactcaaaaagctggataccaacaacccaaataacccaattaaaatggggtacagtgataaacagagaagtcttagcagaggaatctcaagtggctgagaagcacctaatgaaatgttcaatgtccttagtcatcagggaaatgcaaattaaaatgactctgagattccaccttataaccatcagaatggctaagataaaaaaacccaaaggacaacacatgctggcattgttgtggacccaggggaatccttctccactgctggtgggaatgcaaccttgtacaaccactctggaaatcaatttggcagtttctcagaagactgggaatagctatacctccatactccaccataccacaaggacagttgctcaactatgttcatagtagctttatttgtaatagccagaaactggaaataaactagatgtctctcaactgaagaatgaatacagaaaatgtggtgtttctgtacaatggaatacaactcagccattaaaaacaaggtaatcatgaattttacaagcaaactgcaaattctatcctgaatgaggtaacccagacacaaaagtacatgtatggtatgtactcacttataagtatctattagccataaagtacaggataactgtcttaattagggtttccatttctgtgaacaggcatcatgacaaaggcaactcttatgcaggctgtcttagttagggttttattgctgtgagaaaacaccaagactaaggcaactctataaaggacaacaattaattgggcgtttgcttataggttcagaggttcagtgctttatcatcatgacaggaagcatggcaacatctggataggcatagcactggagaagctgagaattctacatcttgttctgaagacaaataggagaagggcattgtcttctaggcagctaagaggaggatctcaaacccatccccacagtgacacacttcctccacaaggtcacacctactccaacaaagccattactcctaataatgctactccctagggcaatcatattcaacaaccacaaagtcaaacatttaattggggctgacttataggtttaaaggttcagttgattatcatcatgacaggaagcatggtaacatccaggcaggcatggtataggaggagctgtgagctctacatcttgttccaaaggcaaacaggaaaagactgacttccagttagcctggaggagagtctcaaagcctacccaccacttcccccagcaatgctacacctactccaacaagaccaaacctccatatagtgccactccctgggccaagcatattcaaatcaccacattccactccctggcccacataggcttgttcaaacatgagtctatggggcccataatctagtcaaagcataatgaaaaaatatattttgtccaacttcaaaagttccatagtctaaaagagtccaaaattcagtcttttctgagatctttcaatcattgatatgtaatcccctaaaaaacaaaataaaaaggcagatcacatacctccaacatcacaggatatacattaccattccaaaatgatattttgaggaaatcctgaacaaaagcaaagccaaaaaaacagctaggaaaactccaaactctgcatctccatatctgatgtcaaaatactcatcagatctctaactccttctgctttgatgacagcaacacatttctttctttgggactggttccactccctgttagaagcattcctcaacaggtatcccatggctctgacatctctatcatcttggggactctaaggcaacatcaactttacaccttcttgttccaatgtcatcttctgggctcctccaaagagtctgagccatttctccagctctgccctctgtagcactccagggtctggctgattccattccactgctgctgctgttcttggtggccatcccatagtactggtatctctaacattctggggtttctcaatgcaactaggtttcatcaatatctttcataggctcccttcatggtgccaagcctcaacttctttgcatgacactttctgtcctggactgtcaactgccactgaggctgcaccttcaccagtggccttccacgacctctcacagtgccaagcctcagcttctctccatgatcctttcatgccttcaaaaccagtaccacttgggtaattcttaaacgttaccaagttcagcttcagcatggctatttctggaacacagcttattcatgctttcagaaaacacttcctagaagatttcacctcagtgatgccagtctcttcttagtaatgactaatttcttagctctagctaaccagcatcatcaatcgtcccagactcctactcttgattctaaagccagagccacatggctgaagctgtggaattctgctgctcactggagctggaacatgcctctttgttctattgtattctcaccaattttctgttttccaacgccttcactgcctatgcttggctgtcctgggattttctctgtagattgaccttgaatttagagatctgcatggctctgtctcctgttacattgggattaaaggcttgtaccaccatgcctggacttaagcttctcatgaccactattcctcaagatctggatcacagttttgccctgcatttctggattgtagttcattccagattaaaagtccaaatgaaagcaatatccagataataataatgcctagatataactatttcttgttcaacagcaaatgtataaacagtaagcttagctgggtaggatcttcccccaaagttacccacttaatttgcttatctcctcaaacacagaattcagctccattgtacttcctggtgctctcttattactggaacacacattttgtaatttttcttattaagtttgctgtgtttcatcaaaatgatcttcatgaaaccaaaccataacacagattctaaactgaattgttttgagacctcctttgtcagtgcaattaatttgactctcttcaccttagcatcaggcagactcttcagacaagtgtaaaacccagcaacattctccaccaaagcatggtaagaattatctccagaactctatcttgagaattcaaattaccctcagcaccaatgtcttccatattcttgctaggatagcccattaagctccactttatagcattccatgcctttccaagtccaaagtcccaaaatccacaatcttccaaacaaaagcatggtcaggcctagcacagcaatacctcacttctggtaccaacttctgtcctagttagggtttccattgctttgaagagacatcatgatcaagaaaactcttaaaagggacaacatttaattagggctggcttaaaggttctgagattcagctcaatatcatcatagcaggaagcatgcatgacagcatccaagcagggatgggaaattgatactcaaaagagaagggggagtgaggggaggacttgtgtgaggaggtactgggaggagaggaaggtctgatattatgttgtaaagtgaataaataattaaatattttttaaaaaatgaaaagaaaagaaagcaagctgagcaagccactaggagtaagccagtatgcagcactccttcatgacctctgcaactcctgcctcaggatcctgtcgtgcttgagttcctgccctcactgtttttgataatgatctattatatgaaactgtgagtagaatgaaccctttcatcttcagtttgcttttggtcatggtgttttaccacagcaatagtaacccttaactaagacaaatatgttctatgttccaacatataactggttagatttttaaattttaattttcactattttaattatgggtacatgtgtatcagaagtatgtgaatattagtgccggtgcccatgtggtccaaacgagaaaatatctgatcccttggagctggagttacagacagtcacaagctgcataccttgggcactgggcactgaagctgagtacccagcaaaagcagcaatggctcctaactgcggaaccatttttttatagcccttggttagaactttagtttagttttggcttttagatttatatatttcatgagtataagtgttttgccttcatgtatgtatatgcatgatgggcatgccaggtgcccacagatgccagaaggggacatcagagtctcttgaactggagttatagtcatgagctgtcccatgggtggtgactattgaacccaggtcccctggaagaacaacaaatccatttaaccactgaaccatcttgtaactttaattttttcaagtcttatttttaatgatggatcttaaatgctttaacctcccttgtagcccaccacccaccagagggagtggaaaagaaaggataccagagaagtggacctgtttagaaaggttctttgaagcaactcccatctgtgttgtcaggaaatcagttcactgcttagcaggcagtggcagctcgatccacttgcaaacacttcaggaatacaccagcagtgcagttctgtagagttgggttagcaacagtggtgacacaacctagcagagacagttaggcctcagccttggcacaagttagccagagggaccaggaggaataccaggagaagttcttgcctgtgcctctcccagggaaaggaagaccagggaagacaggagacccacaagcattgcacagctagctctgccaagctcagccccagtcactgtctgtcgattcctttttataccctccaaacatcacaggtcctccacgggtcttgactcagcacgtgttttgtctcaacactgtctcagatgacatcactctgccaatcaggccgagttggcagaggtggcaagaaaccatagtataccaccagaagtcttttggtgcatttctctttatggagtcctgacaaatgcagctcaactacacaatgtaaggtggaccgatacatgtgtgttgttagcaaagaatccttcatcatgtgtcctttcaggtacttgttttagcagaacatcctctctcctgtgtctgcttcagtgaaacgttccttcatgagtctgccttagcctttcatctgtgtctgtttcaggaaaacgctccttcatgtgtttgccccaacaaaacaccatccaactgactttccaaagaacccttaagtttccccttcaccatctctccagccctaaccctggttacttttatatgtcaactcaaaactatttaagtcaccttggaagaagatctcaatgaagaattgtctagatcggtgataagttattctctgccatcgaaatgagccaattcaagccagattagagtatataaaggcaggtttgttgggaagcagctctagggcagttttactggtcccaaggaactaggccagcgaagttaccccagggagagagacagaggggatggggaaaagagaaagaacctgcatacataaggaaagagaaaatgcacagagagacagagatagacacagagagagaccaaaatgtctacattatatagggaagagcctctcggggaggagaggacctgcccttaggctggaaagttcagagcagagggcagggtatgccaggtaggggctgagggatgctgagggaacctggagaccaggtccctgattttgactatggatgtaactaggtagatgcttcatattcctacctgaacttctctataactatggactgtagtggctggtgttctcttgctaatcatgttaccagaaaaacaaaaacaaaaacaaagacaaaaacacctgtttgcagtgtcctgcacaccaggctaaagaaagcctgcccccagctggatttgttcagcaataaagaattgctgtacagccaatggctgggcaaagggagatggggtgggactcttagtgttgtgtgggctaagacaaaggaggaaaaaggagaattgccttgacctggcagagagacatggaacagatttcgagctgcagaggggagatcattcaaaatgtaggaggaaagggaaagcagccccaggaagggctgcccagaagtgtcttaggcagcaaagaccaatgggcttcacagaccataacagggcagcaaagttaaaagtagatttagaaggtgttgagccaggaataccagagggaagggcatgctagctgcgggaggcttagaagtgcccaaccactgagctagtaatacatgttaaaaataagcttatgtgtgtgtgcctttcattcacggatccaaaaatagctcctgggtgggtgctcctgcaacccgctgggagccaaaagtggtgtagctaaaactcactgctacaatggactataacttggaattgtaagcaaataaaccctttccttctaagctgctttttctcaaaatattttattatagcaacagaaatgaaactaggacacatatgttctattactactctcccctgacttaagatttcttctcctctcaatgtcccctttctagtttcttctccctccccccacctcttgtgtgtgagtgtgtatgttcaaatttaagtaacacagacgagagttgctccaaagaacctttctaaacaggtccacttcccttgtattctttctttcccactacctctggtgggtggtgggctacaagggaagttaaagcatttaagaaccatcattaaaaataatatttgaaaaaaattaaaatatatttctgcctttttgtttgtttttaagacagggtctcactatgtagctctggctatcctgaaactcactgggtagaccaggctggcctcaaacccacagagatctacctgtctctgcctctaaagtgctgcgattaaagacatgtgctaccacattgtgtcagtatttgtctctgttagtttggtttatttccctaaacataatgattttgaactccatccattttttccaaaagtacttgattttatttttctttacagccaaatatgtatatggaccgcattttctttgtccattcacctgttgatgacatctatgttgtttctgtttcttaatatattctgtttcttaatagtgcagtgataaacatggatgcacaactacttttgtggtaaaacttagagagctttggatattatgttcaggacttatttaactgaatagtctctctctctctctctctctctctctctctctctttctctttctctctctctctgtgtgtgtgtgtgtgtgtgtgtgtgtgtgtgttttagggatctttactgacttttatatttgttgcatcagtttacattcccaacagcagtatttaaggtttactcattccctacatacttaccaccatttcttttctttttattatttttttaagatggggtttctctgtgtagccttagtagtttctacttccagatctctgagttcaaggtcagtctgggagaaagcaagttctagatccaggcatggtagtatgcacctttaatctgggctacagcttctgtaggacattggaagaaggaagattcattcttagcttgctttcacttacttgccagcacatctgttagaaccagattcttcaggattccaggttatatagaagaccagctgaaaaaattagccttgtgggactgagcaactactagattcttgaacttcccattcatagttgcctattgttgggttagttggactgcagactgtaaatcattacaatatattccattaatatatagagacatctatgactctagagacccttgactaatacagttggcaaatattttctcccattctttaggttgttctgtcttcactctataacaattctttttttgtttgtttgttttttctttttggtttttgagacagggtttctctgtgtaaccctggctgtcctggatctcactttgtagaccaggctggcctcgaactcagaaatccacctgcctctgcctcccaagtgctgggattaaaggcgtgagccaccactgcccggctatagcttccttcctatttccaggaaaaagccattcattattctatgctacatggagctacctgacagatggtgcagtttctgtgtccatccaggggctctagtcatcttctggtgatgtgctggcagcttcttgctgctttctcagactctggccaattggcagagtgatgtcagctgatacaaactcacgtggagttttgctaagacagacttatgtgctgaagcaagacctgtggaggacacacgatgtttggagggatataaatatgactcagtgaacagtgacagaggcttggcttgcttgtagctttgcaacacttcactgatctctgcttcattgagagaggcacaacaaagaacttctcctggtgtccctggtggtactggtttctcctgatgagtcatgctgatctggctgaggcctggctgtttttgacacacacacatacagatatacacaaaccacatcacaaaatgaaaataggaggaggacttattaagaagtagtgaaagggggtaagagagagattattgggtgtaaaatggcccaaatatattatatacgtatataatattttcaaataataataaataagaaaaaagagaagtgaaaagaaatggaagaaagagagaaaaggctgcagacaaaaaaagagaagaggataggaatggaaaaggaacttttcttttattaaattaatttattctgtcatatattacctcctgacttcagtttcccctcattcctctcctcccagtccctccccactacctctcccctccccatctattcttcctccatttctcttcagtaaagggtaggcctcccatggatatcaaccaaacatggactatcaagttgtagtaagattagacacctcctctcctgttaagatgtggagaaaaaggaatactcctccattgatgatgggagtgcaaacttctacagccactttggaaatcagtatgatggtttctcagaaaactgggactcaatctacctcaaaaatccagctataccactccggggtatatacccaaaagatgtcccattataacacaaggacacatgctcaactatgttcatagcagctttatttgtaatagccagaagctggaaacaacctagatgccccttaacagaagaataaagagctgggcagtggtggcgcacgcctttaatcccagcacttgggaggcagaggcaggtggatttctgagttcaaggccagtctggtctacagagtgagttcaggacagccagggctatacagagaaaccctgtctcgaaaaacaaacaaacagaatgaagaaaatgtggtacatttgcaaaatggagtattactcagctattaaaaacaatgacatgaaatttgtaggcaaatggatggacctagaaaaaatatctttaatctttaaatatctttaagttcctgttattagttattaatgagcacatctattcaaatactaaaatataagtagttccaattttatgttttattatttcccttccttcctttcttttttcttaatatagggtcttactgtgtagcccttactggtcttgaattcagtttgaagcccaggctcaaactaaaaaaatttttttttaaaaaatcctctgactaggtatatgtctttaataccagcactcaagtgagtttaacgtcagtctggtctacatagagaagtccaatccatctagggcaacacagtgagaccctactccctataaagaactcttacaacttaacaaaaacaagcaatccaaattgggctggaatgatggcttagccatcaagagcaataactcctctttcagaggtcctggattcactgtccagcacccatatggtgacttagaactgttgggatctacagttccggaagatatgacctcttctcacttagcactggctcttcttccagagaacctggatttgattcctagcacccacatagaagttcacatatgtctgtaatcccagttccagtgagtctgacaccatcttctgacccttgctagttcttcattcctgtgatacacatacatacaggcaggcaaaatatccataaacatgaaaataaaatctcaaaacttgaaagaatgacacagattccatacactaacttaagacaaaacacatttcctccaaaatgaagcagaacttcattataagaactaaccagtaaccccagagcttccagggactaaaccaccaaccaaagagtatacatggaaggactcatgactccagctgcatatgtagcagaggatggccttgtctgtcatcaatgggaggagaggcccttggtcctgtgagggctagatgcctcagtgtaggggaatgccaggaccaggaagtgggagtgtgtgggtggggagcagagggaggggggaagggataggggattttcggaggggaaactcagaaagaagataatatttgaaatgtaaataaagaaaatatctaataaaaacaagaaaaagaaagaaagaacgaaaacactggattattataatatacccacaacatctggctcctgttatttcttacagatattcactcatgttaatcattatttctgattaagtttccagaaccctccagacatggtgccacacactataatcccaacatttgggatgctaaaggcagtaaggcaggaaaagcagagttccaggccatcctcagctatagaaagaagggagagagggagggaagagaggaaaagaaggaaaaaaaacagaagaaagacaaatgacagagaaaagaaagaagagtcccatatctggtgtttcttagagaggtatctgagtcattgtgattcaggtttaacccacacaactcataaatacagagtaggtttttgttgctttgagataagggatcactatgttaccacaataatcttgaaatgctgggctcatgcaatcctctgcttcagccacccaagtagctggaactacaggtgcttgtcaccatacctggctaagtagcagagttttatcccgtgggtaactaatgtgctgtgcctattaaagtaaccacctacatgctcctttccttttgaagcctggaactatatctctgctggctggctgcctccttggctgagattacagcctacacaggttagaagtttcccccaatgtcactggcctcgggctacatgctatctatgcactggcatggaaagttcctgccaggaactcagagtggggagggtgttacagtctcccactctcttctctaggaaaactgctgctaatgaggtgatatacaggggaggtggggaaatgtcttagtttcatccattgagttgacttctaggttctttgtctatagaagtctgagaatcactagtctttgtggtcctctgaaggttttggctaattccctttaccttttgaggtataaagcaaaggccctgactctgggagtggaggtggggtggagagatgacttagttggtaaagtgcttatctgaaagaatgaaggactgagcttcatccccagaaactaattaacagccaagtgtggctgcttgtttttgaaattccagtgtttgggagaaagacaaacagatctctggagtaaactggacagccaatctaacctatttggagaattctcggccaaaagagagcctctgatctccacacatatgagcacacctatattcacaaacatgcacatacatttacacacacacaaagtcatgtttctgggaatcttggttatggtccagcatataaacataacacaatcccttaggacacttgttcgcagtttaaaaacaggagacctaagctggtgagatggctcaataggtaaagacacttgctgacaaccatgatgacttgagcttaacccttaggatctgagagatggagagaactgactcccgtaagttgtcctctgacctccacacataggccatggcactcatgcatgtgtatgcatacacacatacaaacaaacaagtaaataaaggtaataaaatatttttaaaagtaattctgagaccctgtctcaagaaagagatgtctcagcggtaaaaaagcactgctgctcttctagagacctgggttcaattcccagcacctacaaagtggctcacaatcatgtaagtgaaattccagggagtctgacacattcttctagcccacaggcaccaggtatttcagcagtacacaggcatacacaaacaggcaaaacacccaaggtctataactttaattttttatcttatttttaatgatggttcttaaacattttaatctctcttttagcccaccacccaccagaatagtggagaagaaaggatacaggggaagtggacctgttaagaaaggttctttggagcaactcccatctatgttgtctggaaattggcagttcagttcacaggttagcagtggcagctgcaaacacctcacagatatactagtagtccagtttggtagagttggaataacaaacaggaatcaacagtagtggtactacctagcagagatatccaggcctcagcctcagcacaattcagtaggagggatcaggtgggaggccaggataagttctaggctgtgcctctgtcagggaagcaaagatcagcaaagatgtgagaccaacaagtgtagtaaagctagttctaaaagcaagtcaagctcagcctccatcactgtctatcgagtcctatttataccctccaaatatcacatgtcctccattggtcttgcctcagcacatgccttgtctcaacactgtctcagattacatcactctgccaatcagcctgagttcgaggaagtggcaagaaactgtagcacaccaccagaatttttttggtgcatttctctctatggagttccaacaaatggagctcaactacacaatgtaaggcagacaaatacatgtgtgttgtaagcaaagaatccttcattatgtgtcctttcatgtgtttgctttagcagaacatcattcctcctgtgtctgcttcagtgaaatgttccttcatgagtctgccttagcctttcaccattttgtgaagcaagtaaaggtttgaaatgccccatttctttgtcaattgttaagatgataatttaaaaaatgtatataactgttttgtctttgtgtatgtatgtgcaccacatgtgtgcaatacttctggaggccaaaagaaggcattggatctttggaattgcagttttagaccattgtaagcatccatgtgggtggtaggaattgaacctgggtcatctaaaagatgttcttaacccctgaaacatctctccagtccctctctgtctaatttggatttatcatctgtgatcatattatccttccatgtagccttaccattattttatctttgttactttgagtaataaatgaataaatatttacttggacaatatacaaagaataaaaatacttgtgcatacttgctatttttttgagatagggtgttatatatctcaagctggtcttgaacttgccatacagacaaggatgaacctgtacttctgttttttccagtcttcagttcccaagtgctgggattacaggtgtgtgccaccacacctactttatgtggttctgggaatcaagcacactgcttcatatgtggtaagcaagcactcaaccccctgagctacatttcagctcctggttacttttcacttatgcattcttagcaccatccacacatgttttgctattactatatatgtatatattaacataaatacatgtaattgtgcattaagttaaaatgtttataaagcttctgtataatagaggtctgaatgagcagagctcttttaaataactaatacaggagctaaagagatgacttagtagttaagagcactcattggctgctcttccagaggacctgggtttgatttctagcatccatatagtagctcacatccatcttaactccagttctaggacatctgatgccctcttctgacatccttggatactgtgtgcatgaggtatacaggcatagaacaaacacctgtacatataaaatgaaatgaaatgaaaaaagttaaataaccaatattgaacatgtgcatggtagtgaaatgcctgtaatctcagcattgggaaggtaaaggcaggaggatcaaaggttggttacatggtgaatttgaggccaactcagactacactagatcctatctcaaaatagcaaatgaatgaatcagtgagtgagtgaacaatcaacatcttttattttcatattttttaaattgtttcatttctttttattttttaaaaattatttatttactttcaatttttgtgtgcactaatgttttgcctgcatgtatgtctgtgagagggtgttggttctcctggaactggagctacagacagttgtgatctgtcatgtgggtgctggaaattgaatttaggtagagagcagacagtgctctgagccataaatactgagccatatcttccaccccaatatcttttcaataccagatatttacccaaacccagaggtttttatttttactatacaaggaactcacagcacctcagttctgtcaacagagatgcctgaaaaacctggacatgcatacacatatacatatgtatgtatatatatatatatatatatgcacatatatatatccatatatgtatgtgtatacatatatgaactgtggccacttataataaatggggtatcaaactataaacaaaggctaaagtttcactttctagaggatctaattcttactcaattatcaccctactgtccctataggttgtgataacatattgtgagtctgtacactgccagcgccaggattttttcattttctggggcacctggcaactgagatattaaatacctgaccgtggcaatttcctgatactggttccccacaaagcagtgccaaaatgaatataataggtcagcaagatggatcaacaaataaagtgcttgccataaaagcctgataatatgaatttgctctctagaattgacataaaaggtggaaggtaagaaccaaagatgccctctgaccctgccacatgcatactgtgcatgtatgcattcacacatgcatcatattcatactactactactactactaacaacaacaacaacaataataataatacaaaaatgaatagcactgttgacattccagacatatgggtatctttgtggtgtgctggaatcctttgtgtctataccaatacctagggctgtcactatggcaatggaggagtctcacaatgtagtctttcccagcacaccgcaaagatacccacacgtctatgtttacatgtttgttctcttgcttgttgagcacattcaagcattttgcctggcctgaaactatgtgaaccaggctgacctgaaactcacaaagacctgcttgcctctgtctctatagtgctgggattaaatttgtgcattaccatgttcagcaacagtgactttgctttcaatagccaagttacagaatgaaccgaagtgtccattagcacaggaataataaagaaaatgtggtatgtattcccaaatgcagtgtttatttagccataaaaatgaaattatgtcatttgaaggaaaatgaatacaactgaagataaatatgttaagtgaaataagtcagatttgcaaagataaatatgtaattttcttcatgtatagaacccacatttaaaaacttatatgagacttgaaagtggatagactatttggggagatgactaggactagtttatagggtacaagagtaataagggatgaatatgttcaatgtgtgtgatagacaatttgtaatgccatcaagaaggctattattttgcatgtcaatatatatactagtaaaaaagaaaagaaaagataagtcttagcagaggatggccttatctggcatcaatgggagaaaagacccttggtcctgtgaaggcttgataccttagtatagtggaatgcgagggtggggaggtgggaatggtgggtggatggggagacaccctcatagaagctggaggagggggacaggatagtgggtttctggggggggcggaatcaggaaaggggataacatttgaaatgtaaatttaaaaatatccagtaaaaggaaaagaaaagaaaaggaaagaaaagaaaagaaaagctagagtctggagacaatgactgtggttgcaatttagacaaataggctgagcctcagaaatccacagcactggggatctaacccatggccttatacacaataggcaagtgctctatcactgaagcacatatccagcccacaatcgcctttggatgtaggaatttgagttataaacatattaatcttggcttttattcagtcaaactataatatgttttcaattgagcttaggtctgtaggggaactgggccagtctggattgactcatctcaagcactgccaaagatgtgccataccaattcctggggaaatcttggcttttgatttaaaaaaaaaagcagctatttgaaacagtcaaattatgtgtggtggcatatgccagtaatctctgaacttgggatattgttattttgaaacagggtctcactctgtaccctagacttgcttgaaattagtggcaatccttcctccttagcctattaagtgttaagattattgttaattttcattttgtgtatgcatgtgtgtgaacatgtgtgttataagttcccctgcacatgtgcttgtggaatccagattgaatttaggtatctttctctatcacactccactttatttttaaaatatttttattgttagttttttatgtgtatgtgtgttttgcctacatatatgtctgtgaaccacgtgtgtgcttagcagaggccagaagagggcaatgactagagttatagatggttgtgagccatcatgtgggtactggaaatcaaacccatgtcttatggaaaaataggcagttctcttaaccactaaaccatctctccagccactttaccttattttttttttaaggtagaagcctctcactgaacctagagccctcttttcatatggagttttacatgcatgtgccactactccagatgggtgctgtgaactcagggacttatacacagcgagcactttacccactgatccatacctctagtatcccatatcctttttagttaatcaaaaacaggtctcactgcatatccctggctatcctagaactctgtgcagatcaggctgacctggaactcacagagatctacctgcttctcccttgtgagtgctgtgattaaagatgaacctagactccttttattttttaaaactaaaaaagcaatgaggaaaaaaaaagaaaaaaaaaggcaatgagatttctgggttcaggaaacagaaggaatacaacaaaaatcctaacgtctcatattcttctaaaagcataaaaaaatacgaggagaaaacaaatgagcccgttggtggcccgtgccttttatcctagcactcgggaggctgaggtagacagatttctgagttcgaggccagcctggtctacagagtgagttacaggacagccagggctacacagagaaaccctgtgtcaaacaacaacaacaagaacaacaaaaagaaaaaaaacaaaacaaaacaaaaaaagattctctctctgcaactgcccaataatttacaattttcaagaacccaggacgcagacaactggcaaactccagatcagaatgcagagttcaggaaaccagaaaaaacaaccacttcatgccactagggtgtgacaaggcagtaggaggtgctaaggatctcagcgatcccagaatgtactgtgatccagtacagcaagacattgcccaactgtgcttgaaaacaccagcgtgcagatgagctcaggtccagtcagaaggctcagaggagcaaaagggaaagaaaacgaaactgggtggccatgggtacggaagcccaaagaggtgctgggaccagaagagggcgcctgagaaccgaggaagccgcagatctattgagttccccagggcgtacctgtgctaagctggcatctaggagaccaagaatattcaagtatcaacagcgagaacaaatgcaaaataaaaggggggggggaggctgcatttgcacaaaggagaaaaaagcccacaaagtaagcagtctaagcagtgacaagcagaagatctccagcaatggttctccccccccctattttaaattggatattttctttatttacatttcaaatgttatcccttttcctgccccccaaactcccataccatccccctccccctgattctatgagggtgttcccccacccacccactcccgcctccccaccttcgcattcccctacactggggcacagagccttcacaggaccaagggcctctcctcccactgatgcccgacaaggccatcctctgctacataagcagctagagccatgagtcccaccatgtgttttctttggttggtggtttagtcccagggagctctgggggatctggttggttgatattgttgttcctcctatggggttgcaaaccccttcagctccttcagtcctttctctaactcctcccttggtgaccctattggggaccccacgctcagtccaatggttggcagcaatggcttttaatgttctcagtgattcactgtgttcttcttgagttcgtgggttatttatttttttatagatttattattattattattattattattactaagttatttatttattttccaccctgattgtagctttccctcccccttctcctcccagtcacttactctcactttccctcaccctaatctaccctttctactcctcagaaaaagggaggtataccatgtgtcttagtcagggtttctattcctgcacaaatatcatgagcaggttggggaggaaagggtttattcagcttacattttccacattgccgttcatcaccaaaggaagtcaggactggaactcaagcaggtcaggaagcaggagctgatgcagaagccatggagggatgttctttactggcttgcctccactggcttgctcagcctgctctcttatagaaccaagactaccagcccagggatggttccacccacaaggggcctttcccctttgatcactaattgaggaaatgccttacagttggatctcatggaggcatttcctcaactgaagctcctttccctatgataactccagctgtgtcaagttgacacaaaactagccagtacaccatgtctatatcaaccagccttggcatatcaaattgcagtagactaggcacatcttctccaattgaggctaaacaaggcagcccagtagtggaaaatgattccaaaggctggtaacagagtcagagaaagcccctgttccagttgttacaagttccacataaagactacgttgcacatttgttacatatatgcagagtacctaggtcaatcccatgcatgctgtctggttggtggatcagactctgtgagcccttatgagcacaggttagttggctccttcaatccttccttcccatcttacacaggattgcccaagctccactttatgttgggctgaaggtctctgcacctgtttccatcagttgctggatgatgcctctctgatgaaggttatgctaggctcctgtctgcaagtacagcagatatatcattaacagtgtctcatggcatgagtctcaagcagtcactggttgtcccttccctcaaattctgctccatcttttttacctctgcacatcttgtaggcaggacaaattatgggtctaaggttttgtgggcaagttgagtcccaatccctccattgaaagtcttgcctggttacaggacatggccagttcagtctccatgtcttccattgctaggagtcttaactagagtcaccctcatagattccagtgtcctaggtctctggctggtcccagagtttcctcgctattgaagaatggataaaaaaaaggtggtgcatttacacaagagagtattactcagctgctaagaacaatgacatcatgaaatttgcaggcaaatgggtagaactagaaaagtatagttcccccccccacccacctggggatccatcccacatacagtagccaaaccgggatgctatctaggatgccgggaagtgcttgctgacaggaacctgatatagctgtctcctgagaggctctgtcagagcctgacaaatatagaggcagatgctcacagccaaccattggactgaagggactgaaggagctgaagggtttgcagctccatgaggggagcaacagtgtcaaccagtcagatcctctggagctcctggggactggaccaccaaccaaggagtacacatggagcggcccatggctccagccacatatgtggcagaggatggccttgttggacatcaatgggaagagcagcccttgggcctgaggggggttgatgcaccagtgtaggggaatgtcaagtgacaaggcaagagtgggtgggggatcaccctcatagaggcaggcagaggggggaagggatacgtggtttccagaagggacacctggaaaggggataacatttgagatgtaagtaaagaaaatatccaataaaagaaaaaaattgaaaaaacaaaaaggaaaatatcctgagtgaggtaacacagacccagaaagacaatatggtatatactcacttataagcagatattaggcataaagtacaggataaccatgctacaatccacagacccaaagaaactaagtaataaggaggactcaagggaggactcttgaatctcacgcagaagcagaaatagattaaatatcggggtggatggaaagaggggactggatgggggaaggatgggatgggaacaggagggatgaggtggggggatgaagggagagtgtactggaagagacaaatggattggggaatttatatttttcatggattctctgtgtttgaatcaattcttgtcatataacttttctgttttgttttgaatgtgggtgtcatgcagcccaagatggccccaaactcactatgcagtactgaaccaggtcagaggagagtatcaggttccctgaaactggaattatagatgtttaagagctaccatatgtgtactgggaactgaaccctggtccactaaaaaagcaacaagtgcacttaacaactgacccatgcttccaatccctataaattatttttgatatgtaatttgtcatcatgttggccagtggatacaccttcccacgggtcttttgtgctcttgccatcagttctggtgcaaccaagatgcttgcagctcatcacgcacatgttttactaggaaatattcatctagtaaagcaatttacaaacacatttaaaaaagtgagttcctattaaaatttccaatttccagggtttttttcgtttttgttttttgttttttgtttttttttttttacatttttctcctttttacactgaagaccaggatctgtggaactcatttcttatttttgttgtcttataatgtgaaagcttgtaaacaatacatatatgaaaggggggaagattgctctgagtacaggaactgcacccagctgagagttcaaaagagatcataaggcatgggtatcaccaagcacaaagtagttagaagtgactcacctggcccaacccagctttaagttcataaccaaatatagtgcaatacattttgcatttagtctggcaaaaacaagactcacactcttggctttatatttatccactagttaaaacgagaataactgaacctggcaaatgttagtgttattgttgtagacccacgctccctacccccttgctgaaggcttttgtgtttgttccccaactgttgaattcagtagtgagggttctaacttcatcaatgaaataacctactaatggaaataaaaattgatagaatttttgagaggctgccaaaaatatgttggtgaaaatgagttgttaagtattcaaggtaccttcaaggggtaccttgtccctacacccttcctttttctctgtttccttactggctgccatgaagtgattatcaactcctataggctcctacctctatgatgtgtttgtcctgaatcaagcctataggaaactgagcccatctaccaagggccaaaatctgtcttccttgtaagttattagaaggtatttgttacatcaatataaagctctgactgtcatgtgacttttcctaaggaaacataaagaaatgtctactcactgcagaacaagagaacactgacagaccaaagaaagtattccatcttggaaaatcggtgagttcattgggttacttccaggaatgtgggggactcaaagagagccacactagtgggaagaccctgggcaatttgtgggcagctacaccactaaagagttccaccaatagcgtgggtgactcacaagaagctgtagcactaaaaatgccacccacagcatgcataattcataaaaagctataccagagaaaagtcccttccaccagtcagccttccatctcccacacaggacccgtgagacccatgatctgcttgtttctttgcttattagtgagtgttgttttggggtcattcacagctattctgattcaatattgcaattgccatgtccatactagaggaaacagctatgcagcactaacatacccttattagaaactttagtgctgtttgatgacttcttttttttttttccgagctttcccctggccttctttcacatccaccatgggctgtgtgagatttagtaggtttttgttgtttgtttgtttgtttgtttgtttttgtcaacttaacacaagctagggtcatctgggaagaggaaacctcagccaagtaaatgcctccattagtcaggggggggggaggcattttcttgattatttattgatgtcagagagcccagtccactttaagaaatgtcaccctgggcaggtggttctgagtggtataggagattaaagtgagggaccagggagataattcggtaggtagaggcacctgctgccaagattgacaatctgatcaggttcaatccctgggagctacatgtagaaggagagaactgactcccacacattgtcctctgacctctgcatacacacacacacacacacacacacacacacacacacacacacacacaaatactaaaatataatgtaaagacagcagacaagctataaggagcaagggtagtaagcagtgttcctccttggcctctgcttcagttcctgtttccaggttcctacttgagtccctgccatgacttccctcagtgatggtctgtgatgtggaagcataagccaaataaaccctttcccctccaagttacttttggtcagtattttaggacacaacagagaagctaactaggacaagctgagatgcagttggtagtatagtgaagagttttatctctaaagatgttttaatatttaattgtgatcaaatgaccacaacgaaaattttgccatgttaagcatttctaactgtatagttctgtggtgtcacgtatatggacatagttatgaacatcacaaccatttatcaccagagcctcaacatcttgttaaacgagactctggtcccatgagtcactaaccccatgcagttctctctgggccctggcatccatccttccttctttttatgagtttgactactccagggactacatagtaaatggaatccaattgtaactgagtttggaaaatatacctcttttaaaaatatttttaaactaaacaggagatagtaatcaaggggaaattctgttcaatctaagacttgattcttcactagattgtaaaaatgaaactgttttggaacatgagtttttttcaagcaaaaaaatatgttgagaaactgggtttgatggcaagtgactatagtctcagtttgggaagctggggcaggaaatgtgtttgagccctggagtttcaaactaaatctctaacaccggggtaaaaagcctggcatggtagtacccagcactgaaaaggccagatgatccagagggttttttttcattaatttttgttacgtgtatattcctaaatatgacctgatcagtctgtataatgtaacttgaatgtttatgtcttcaggactggccattttgtataggataaccaatttgtgtgttctttgctgggggaaactattatttctcttactctcaatgttgcttagtgtcctctagttctttgtgtagggttgaatcatcctagacttccctacccttattcacgttagcttgttttattgttgttgtccatgtctagctcatgcttgggcagtcacatcagtgagactttattggtgtagtttctgacatttctaggagacatactctcacagcaaactccctagtcctctggcttttaaaaatctttctgagccttatgtacaagcgtgctttttagatttatctacaattctgcattttgattggttgtggttttctgtaatggtcacatgcctttagtcccagcactcagaaggcaaaggtagtcagatctgtgtgagtttgaggcctgcatggtctacacagtgagttccagttctgccagggttacatagtgagacactgtctaaaacaaacaaacaaacaaacaaaaaatacaagtctggcaaccagagtgcataccttgaaacccacataaaagtgtaaaaagaaaaccaactccattaatttgtcatgaagtccaagggtgtagctttgtagtagaatgcttgcccagtatgtataagttccacccaagcctcaatatccatttcaacttcagcctgagtaagaaaggttgttacctttttttttgtgtggggaaggagcaagttggaattatgggctagatatttctggtagatatagagatcttctgattttggtaagctgtgttttctaagagtttgtctattttaccatccaaattggctggaataaagttgtttataacagtctccttgaaaaatgtgtacagtggggctggagagatgactcagtggttaagaacactcgctgctctttcagggaaccctggttcattgaccagcactcacaagatagcttacaacacctctaacttcagtttcagggggtctgatgctctcttctggcctccataggcactgggcatacatttgatccacatacatgcatacatgtaggcaaacatacacagaaaatgaaagtaaatgatttttttaaaacatgcgcaaatttgagccattgacctcttcttgtccctctattttcctcccaagatttttttatgtgttttatcactattttgaagatgtcaaaggcaaaagagcaaatgattccttgtcttgtagttggtcttattgatggacttgagagttgaatgaggggacagacattcaccaaaagtcctaataaaagacttatataataaaagtcctaatagaatgagtctaaaagcggaatgaaagaaagtgtctggaagccctcaaaattcctaataagttctccttgagaaggtgaagcactatctacatgcagaggagctggtgtctgggagaacttctacctctcctgagctccagagctatctctcagttttgccctgcctgcccttgtccaatattatacttatggcatctcactgtagtgcttcaaaaccctagggaaggagtttagaagtgggaggggaaagaggaggtggaataaggtattgagttctaagtcttggagttcctgtactgttgagtgctaattgatgattagggctaacagaagatcaagtcttgatttagcttaaagcggattactaccttagaaaatacccaaacatgtgtgaggacatgtgagctccccagatctaatgacagctccctggagctccagaaagagggtgggtagaaggagaggggccttggaaatggaagtaaagggtgaaggaggagagaaaatgggagtgtagcagaacaagggcaatggtgagggtggagagagaaaggactccgatgtcagcatccttttttctgcctcatcccagcatcatttgccatcattgtaccagctggcatcctggaagcctggaagattagatgtcacacttatctctaatctatttctaaatgactttataaaggattgcttattaggagttctggaagctgcctgtcaccttcattcagctcctctcaacttcatctggcaggtcaaggactttatcagcaacagccagtagctgattttgctagagaacaaggaaccatttgataatttcctttgacattttaaaagtctaccaccctagccattttcaaatggacagtccagtgggactaagcatgatctttattctgggaagctgtcagtacttccaactctaaaatttgttcattttggacaagttgtacccatgaaacaccaactgccctgtcctctagctcctgctaatcaccagcctacctgctacaaatctggctactctaaggacctcctagaactcaagtatttgtcttttaatgcctgattcatttcatggggcttcatatcctcatggctattcatgttgctgcatgtatcagaattttcttcccttttaaagctgagtaatgggtatgccatgttttgtttagtcattcatctgttgctgcacaatagactgatacccacctcatctcagtaaggaatatggctgctgtcaagatagtggtacaagtttttctttgaaacccctattttcaagtcttttagatcacacgataattccatgtttaaaatttttcagaaagaagctggatcagttaatagggtccttgcttggcatgcatgaagccctgggttcaatctctggagccacataaactaggtactgtgattataatctctgtatttgatgggtagagagaggggaatccagagttcaaagtcatctttagctatataacaagtttgaaaccatttcacaaccttcccccatttcttgctgctaaactgttttacacagtagttccacatctctatctagttctagaacacttacttcaccctcaagggattcccagtacccattagagaatcatgttccagctggcaaaacgtctcagcagataaagacaccaacatccttgagacccacatggtagaaagaaagaattgactaccacaagttgttctcttgtcctccacacacatgccatggcatgtaccgtccccccccacacacacatgtaatttaacatttttttaaatatttatttttattttatgtgtatgagtgttttgctctcaagtatttgtgaaccacatgcatgcagagcccaaaagggccagaagagggcattagatcccctggaactagagtgacagacaagtgacatccacattgtaagtgcttggaatggaacctgggcccatagtcctgggatcttgtgatccatttggctgccagaaaacatgtggcactctgtgatccatgctgctgcagactgctacacacaaagaagcttctttcgccgtggtttcaatgactgtagactcataacttagaatcagagactttgaaggtttctgtaacaatgcctcttgagcccccccaaaagaagtaatccagacaggaagctatcagagagtccttaaaaactgtgataatgatgctaacatgtaattcttcacagtttgatgacttcttgtgatgctgataagtggggaggacagttttctttaagaagctggccactgggagtctgaccatgctccaatgagtatatgggcagcacaaattggacttggtagggttttgggggaggcgcaagggtggaagggcagacctgagaggaatgggaatcaaatgatcagggttcattgtatgaaattcccaaataattaataaaaatagtacattgagaaaaaataaaaataataagtctttaaaaatattctagatattgggaaaggagatgggtagacaaaagaggttggatttgagaagtgcccatgctgacatattataaccaatccctctaatatataaatcaatacacactactaaaatattttttaaagtgttaatcaaaagatttatcatgagtaacaaaaattaaatcatgcagagcaatgtttagggaaactttccatacatctcttaaatgattagaactctggtgcatatgttctgggcttcctaataaatttttcaataatataaatgaatactttcgaaatcctgtatcacaaatgctatttaattgaaaagatatcatcaatttgccccactctaggaacttagaaataaagattaaatgacctaaaaaagttactctcatctcccttcctctaatgtactagtaataacttatctactttctgtctcaatggatttgccttctctttatacttgacatcatagaatcatatctaagtggcttttggtgtgagttctgtctagaaacatgctttctgggctgctgctgggcaagactgtgaccaggattaagttacacacagagcctctaagcttggtttttacatggttacatcaattaattccaagagcaattcttgggatgggtagctacaaaggttctacctagctcccaggttaagggtagggtcaagagtagaatggtactgtagaatgatagcacagagggtgaacacattaattccatcagcccatgagtctttactgagcccaagaagctaactcaaaggagatattcctcaaggcagctggattccaggaccaagtagagaggagctagtgggaaacttaagagaggattgcttcctgaggatgccacagtaagaaagcaggagtctttgcttggaagtggtcatgttcaagtaattagtgtctcctactaattgtgaagccagcagcagccacgctgttatgagcagaggaggacagtgtggcaccctgtctagacaatgtcaagaagcaggcagcagccagctaaagtccaaggacatattgtgcacttgaacaggcaaaagggaagcacatgtgagcaccttcaagtactgtgccatgcttctgggaagacctacatgggctcctagtgacaataagagttgcagctggcagagatggaggataaagaaggctgaagctgagagaggcagtcagctcctacccgcttttccatgggagcaatcctgctaacacacaatgtactcttggggcccaccaataaactgctacacagttgtgttccagatgtctgcttgaaaggtttccaggagctgctttcagcagagtcagagaaaggaagtagactggaactctgagctgcttccctactcacactctggtccacaaaccccattttcctgatccatagtagtagaaagaaatggaacacaaatctttgtaaataagcccttgtaaacaagcaagagctacagtggcttccacaagccctactgcaagccaggaatgggaacagtggtgtgtgtgcaggcaaatggccctgagccacccctgtggattggactcagaaacatggaagtgagggtaggaggggatgatctaagtcctgggcccaattaagagatcagatggtgaagggtttgggggcctttaaggtaaggaggcctgggctgatcctgcaggctgatataaagtcctgtaaccccataggcaatgtgccaagtctgacaggttccagagacagttttctacagccatggcccaaaggcttacaggtgaacagacactggaccactatgaggatagcacccatgcaagcatcttcacctataccaacagcaacagcaccaaaggtgagcaacaggtgcactagaggttcaataagcaggccaggtctctccttaaagcttccctagaacctggggttggcaacaacctagcattgccggagccactgctgtaggaacagggatctcaggccaaactagctagaaagcacaaactttctgtacttcacctccacaggatggttttggcacctgtgccttcaatgagacacaacacctctgttttttgatgccagggggtttgttttgtgcaaagcttcaaatgtcaaagttatggaagagtatcatgaactcaggtccttataaaaccataacttccataggttttatcttatttcatctgtgattcttccaacccctttcttcctgattatttttattttaaaaattgtttttttaaatattttatttatttatttatttacactccagattttattcccctcccagtccacccaccaatcgtttcacatcccatatctcctccctgccccccatctccacaaggattgtccccaccacctaccacccaccgcccaccccacctgacctctaaactccctggggcctctagtctcttgagggttaggtgcatcatctctcactgaacacagacccggaagtcctcttctgtatatgtgtttggggtctcatatctgctggtgtatgctgtctgtttggtggtccagtgttagagagatctcaggggtctaggttaattgagactgctggtcctcctacagggttaccctccttctcagcttctttcagtcttccctaattcaacaacaggggtcagaagcttctgtccattggttgggtgcaaatatctgcatctgactctttgagctgcttgttggatcttctgaaagacaagagagaatgaagatagatagatagatagatagatagatagatagatagatagatagatgatagaaagaaagaaagaaagaaaggaaggaaggaaggaaggaaggaaggaaggaaaggaggaatgaatgaaggaaggaagaaagaaagaaagaaagaaagaaagaaagaagaaagaaagaaagaaagaaagaaagaaagaaagaaagaaagaaagaaagaaaaagaaagaataagataagataagatagagacagagagagagttgcatatagacatcggaggacaacttggggacatatgtgtagaggtccgaggataacttggagcagtcagttctctctttctactatgtgggacccaggatcaaacatcaagcttggcaacaagcacctttacctactaagccatctcactagttcctcctgattcctgattcttagacataaatctaacacattatatccttctttatttaaaatttaattttttatttattcttcactcatacattcccctctctccactcctcccagtctcttccctctaagatgatagggctctataaaacataactatgatgtcatcctaatactaaaaattcaacaatgtttcctggactgtatgcattatcttagttgatattagaaagaccttactttcaactggtcatggtagcagatgcttgtatttccagcacctaggagatagaaacagaaagatcagaagttcaaggcacatacagagtttaagggcagtctgtcgtacatgaaaccctgtgtcaaaaaagtaaattaaccaggtatatacctttagttctagaacttgtgaggcagagataggtggatctctttgattttgaggccaatttgttctacatagcaagttcctgtccagccaaaactatatagctcaagttcttggctacatagctctcaagactttgtgtcaaaaggtcatgttttgtttttgttttccattcaaatctagttatttatcagataatgcatacacaacatccacatagagatcagaacttgtgagagtagtgagttcccttccagaatgtgtgttccatggaccaaactcagattgccactgagttctattgacaatctcatacttgtttgtttgttcatttgttttgtttttgtttctgttttgaatcagagttttcttatggttctgaagccatcctggaatttacagcccagggtggccttgaattcatgatctcctgcctcagactgcagagttctgggattacaggcatgtactactataaccagaaaaagtgttttatacttttttttaaagttgatttgaatcaaggcccaaatgaaatttacagattcatgttgatatctagatcaaacctagtgcctcatatatgcactctaccatgtatctacttccccaacccaactgctacatggttcatttcccttgcactttttttttttaaagaaaagtaactcctttcctttgggctttccctctcttgaaacattgctgatgactagcctatatgatttaacttgccactctgagttgttttatttatcaccttttttcctgtaaattaacagttgatctgaaagtctgactggtatgagaggcaacttttggcagaagtaatagaaataagagcaagttctgggtcaggaacttctaagtaaatctttattggggcatcaactcaagcagaacactcaacttgagcagaaagtactcagcattgatagaaatagaggtcaggctgctctgcagatggaggaagagaggcaagctcttctttgtttactggtctagcctgaagattttctcctggctatagctttggtctcaaaagatgttctattttttacttaagacactggctagtcctagaaatccaggtgctgcaggtctatacacagaacggagtagactctggctcaaacgtcaacgcagtaaggtggaagacagatgagtcaagccatatcatcccattccagtcacgctatcagacacctgcaggccaaagtaaagagacagaactttcagcataaacagccttcaggtccctgaacagtaagctaagaaactgttaccacaaccaacacctcagagttgttctctgcattgaagctaggaaatgaccttcagaattagtgctatttgagctgaagaactgaatgagagcacttactgctcttccagaggatcccaattcaaaccccagaacccacatcaggtgtctcagaactggagtctctaatctagctccagggaatctgacacctctatcctctgaggataaatcttaaaaaagaagaattagcagtcttgaagtttactgagagccagcaaagctaaagttcttatttagttttctctcagttgttagactagcatccagctggaatctcgtgtctcagtgatgacagctttcagaagcatctcttgggaaatcacaaattgctgatgcataatgcctacacacataaataaaatattttaaaatattttaaatagggttgctaaatacctaacatttgtacatgtctttttacacttaggatgtatgtccttaagttgtgtagttgagacactgtgctttcagtccctgtcttgggatgtaatgtacatttaggatcatttgtttttgtttgtttgtttttgttttgttttgttttgctaacagagaattaattttttaaaagatagacatgcaccagcacacctggaaatcagatattacattttaagtttaaattttaggtcaggcataagccactttgcttgtaatcttagtacttaaatgcagaggcaggataagttcaaggacagcttggtctacataccaagtttcagaccagccaggtttacatacctaaaacctgttcaaaatacattttatagttatgtaatatgttggttataaggttctaaaggaggcaagcatagtggttcatacctttaatcccagcaatcaggatacagaagcaggcagatctctgtgattttgaggccagcctggtctacatagcaagttccagcacttccagggctcagtagagataatttatccaaaaattaaataaagaaatattaaatttaaaatttttaataataataagtgttccgaagggaaatctagaacacaagatagattagtagaagtccagcttccatgacccaattgttttctttcctgtattccttacaacttttttatgtaggatctgacttttgatacctttttctttcttatttctttatgaatcttgttcaggcaggagggacaggccgctcttgtgtcattgctgcctgggcctggatacttacttctctttgtcagtgctctgcctggtttgaagtctattctctagaaggggctctggtttagaatctgtgacattcaattgctctaacctctttgcttgtctataaactagacgttcaaaataccacccagttctcctttttctgctccggttattctgcagtgctttctcaggggagctacattacagtctgaggcttctctgttctcatgtctattacaatccctgttgcttcaaactattcccttctgcatagagaccaagaccctgagtctgaggttatgaatggcctgttcttacatctcatatttgggcttcctggaaagctgtgcagggttttcttttagaaacaaataggacctgcacacagagtgaagcagaggagtcacaggatgcaattgtgctgggggtgagattttccttcccagggaacacagccagaacagccttgcttttcttgagctattttgttttagggagtttggggaattttaggggaggttggtgggttttaggggggggtgatgggttttgttttgtttttttttttttgctttttgttttttggtttctttgtttgtttgttttgttttgttttgttgaatgaatagactggagaattctatcaaacacaggtctctttgtgtgtgtctttctaatgctgtgaagccttatcgagtaatagagattggggcttgtgaccctatccaattattctggcaaaaggcagcaatggcaaatgttccccttttataaagacagccatcttactggattaaggctcacattaattgctttatgtagaaggctcacatagagcaaggaaaagtgaggtcaagattctgattcggcaacataaagctttgtacacttcctcctgtattttgtacttcttggctccaggtccctttgaaggccccaattatcacattgctcccaggtgggtgtaccacctcaccagcacctggatgattcttgtggtcgttgcatctgtcttcactaatggacttgtgctggcagccaccatgagattcaagaagctgcgccatccactgaactggattctggtgaacttggcagttgctgacctagcagagaccattattgccagcactatcagtgttgtgaaccaaatctatggctacttcgttctgggacaccctctgtgtgtcattgaaggctacattgtctcattgtgtggtaagttgaaagaaacacaacctggtatgccgaaaggaaaccatactgcaaaccctggggttcacaaatggtgttcatgtatgagacacagtctgaagggagatactcatagtagaagctggatcactgtcagcacaagggttggaggacaggttaactggattttgaagacttccatctaagcacacatattcaactcagtttgcttgagttcaacatcaagacaggttctgattgtatgtacccagtttggggccttggggctcacgtgaaaagagatagatattgagccagagaatttcagaaacatatggaagacaggctcagggtaccttcgatagacttctagctaattcaggaatatatgtgttttcatcctatctctcaggctggttaaccgtactggatgagctgttctcagagaaagacaattcccagagctttttgagatattgaccagattctagacacttttctttacaactatcactaatactggttgtctatggtttgcttaggttaggtaactaagggctgatgagatggttcagtgggtaaagaagcttgctgccaaacctgatgagctgtgtttcatttctagaacccacatgttagaagaagagaaccaactctcgaaaattgtcctctaatctccatatatacactatggctacacacacacacacacacacacacacacaaaccctaaaaagtagtggctaagaagtaccagtgtgctatgttctgtactggagagggcccagtaaacatatggggacaacacaatgcctctgttaccctctctcttaccttatctctaattgggcaaggagagtccaggagtagtagccagtctggaagacaggctttgttgaacatatatgaaagggggggcgttgaatgtcatgcttataagcagatactttgagaggtccagactggggggtggaagacccacaaatggacatggttggaaccccacttacctagctatatacccagcagacatctatctatcagtagctgcccttgcttttggttccctcacttttgtctctccttgttcctcatctatttggcagataaaagttcagaccagagggagtatggaggctgtatcccaaaagaataggggtagaataatcaggaaagatcaagtaaacaaaatttatctcccaggtccaagtgctttcagttatagatgtgtgccttggtggttacatggccttaagtggcatcctcatgtctggctctgcctctggtaggcttgcctttgtcctactcacagtatattcttggttcactcagatgtccagtagtcagcatattttggtgtcacagatgccttcaccctcaggaatgtttacaaatccgtaaaattaaatccacaacattacaaagttatcaatgacattgaaaaaatatttatcaaagttttaactattagtgacatagtctttcataagaaatataagtattgctgaacaatggtggcacacactttattttttgtaatttagtgagtttattatatccaaagttgttcaacaatcactacaatcaattttagaatattttaatagtgttgaaagaggaatcatctctgttagcagtcacttggtgttttcccagttttcattctaggctgcctctagccatatgttctagacatttcatgcatttagtgatatgctatgttttttcttccaagactgatgttttcactttgcatactcttttttttttaaattccttaattttttattcctggtaccactaccacaatttacagggcaatatacctgatgtaatgaaaagaaaaagaaaaagaaaaagctacaacagataaaagacctcaggaatgtacatctaattgacactacattgcattaatcaatagctgcactttttgcaaactgtggctatgacagtcctgaacaagaagggtttcctgtttaagctgcagtaacttttctgactatggatcatcattccttctgtggcagatttttacagttcctctaatgcttttgggacgactgtctcaaagtaacctgcagctttcctgacaactcctcgctctctctcctgctaagaactgtagctgtttctgttttattttaaaaccttctgctaccatatccaccacttccacctccagatccatagccaccaccatagggactgcctgagcttcttccaccaaaactgccccgcttcatgggtccataatttgattgttgctgtccacaataatttccaaagtcattatagtttccaccaccaccatagttacctccaccaaaatttcctccttcattgtaaccatcatagcctcctcctccaccaccatatccaccaccctggtttccatatcctggtccaccacctccataacctcctctactactgtaaccaggaccaccaccatagttgccaccatcacctccaaatccattatatccaccatcaccacctccacaactacctctgctgtcaccacctccaccatctcttccaccaaagtttcctccacgaccaaagtttcctccaccacctccaaagcttcctccatgacccataaagctgccagctccacctccatggcctctctgggatccagcagactgcatctcttgtttagaaagggcctttttcacttcacaattatgtccattgatagtgtggtatttctgaacaacaattttatcagctgtgtcatgatcatcaaaagttacaaaagcaaatcctctctttttcccactctgcctgtcttccataacctctggtttcagtcttgccacacttttcaaagcagtctctcaggttatattcttccgtatcctctttaataccaccaacaaaaattttcttcaccgttaaatgggcaccaggctttacagaatcctctctagaaacagctctctttggttccaccacacgtccatcaaccttgtgtggccaagcacacattgcagcatccacctcttcaacacaagagtacgtcacaaaaccaaagcctctggaacgttttgtttgggaatctctcattaccacacagtctgtaagtgtgcccatttctcaaaatgttctcttaagctatcatctgtggtttcaaagctcagaccaccaataaacatattcctcagctgctctggttcctttggatcatgcccccccccccccccgccccggcggcgacggctgcagtcaggctgggggcgaccaggcggcggttttacctccattttgagaccagactcgcctcttccaactcgagttcaatatccactttgcatactcttttcatgggtcttccagtggcaaaatatatgagcatttaatgtctttattattttatttttttatcaatcatcccatttgtttacatctcaaatgatatcccacttcctggttaccccctccaccaactccccatcccacaattgtcctcccctttacctgaatgggagtgctccctcacccatccacactctcccaccctactgctccagcatccccccacactgggacatcacacctccccaggaccaacaagggtctcccctcccattgctgtcaggcaaagccatcctctgctacatacgtatctgaagccatggatccctccaggtatacttcttggttgatggtttggactctggaagaagagggtgatcatgccagcctatgttgttcttccaatggggttgcaatccccctctgctccttccttcctccagctcccccaccaggtttcctgagctcagtctgatagttggctccaagcatctgcatttgtgttggtcagttgccttacctggggaatccatcatgtctgcagacaccaaacccaacactgttaccgtgatcaagaggtgcttgctgacctgaacctagtgtggtggttccttgggaggtacagccagcaactgaccaatgcagaggtagcacacacttttaatcccagcactcaggagacagaggcaggcagaactctgagttcaagggcagtctggtctacagagtgaattccaggacagccagagctacatagtgaaaccctgtgcaaaaacaaaaacaaaaacaaaacaaaaacaaaaaacataaaaacaaagcaacaccaaaacgtactaaactgtggactaaaatggagctagagagatgtcttagtggttaagagtatcagttgctcttccagaggacctgggttcagttatgtagcatccatatgaaggctcacaaccactttaaactctagttccaaggtatttatcaccctcttctgacttccatgggcactaggcacacatgcactaggcatacatgcactaggcatacatgggcatatatgcaggtgaaacactcatacactcaaaataaaaataagtcttctttgaacttcttcactaaaacattagcaacagtgttctgtactaaagtgtttcaacaagaatctgatctgactactaataaaaattcagtcaaatgacaacgagtaataatgtaaggtgatatgagaatatctgtcacttttatatctagctgactgagtcaggggtattattcatactgccaagttcatacgagaaggtaatacagtgtcctttagaggttaggtgagtgaaagatgctttttcccaccctggtttgtgggtccctgaggcttgtgtacacacctttgggcataagatggagtgagaacctgtgccaccctccaattagagagaatctgcgctgtccccaaacactcaaagaaacagcaaataagcaggaagggtatggatcacatgttctatttctttggaacaataacacctcagtgtggtcatgccagaatggacatgtgtttccaggaatttcatcaatgacatcagaggaagacagtctcagagaccaagggaacaaaaagggtttgcagggtccctgtgggcaagtcagccagctaccatagccctttcttgccttcttttcagtgatgaggtgtgcaggctgcagttgaggagagagagctatgagagttttaagttaccagtctcaggattctatgactcagtaactaaactgagaactaggacatcctgctccagagcacaagcaactatggttagaaggaaggtgaaagagtagaaagacagaggagaaggcaagttgctggttttagcttggaagcaaaccagatgagcctaaaagaggaggggaaagaaggtgagacacctatgtcataaaaatgaattgaacaaaatatccattcaccaagaggtccatggaactctagatttaaaaacatttccaaggatttggtgtggcagctaggagtcttaaaatctgccagccaggaggaggaagcagtatgaataatcctttgtttgacttgaagcctgttctatctcttcttccgtgtaggaatcacaggcctctggtccctggccatcatttcctgggagagatggctggtggtctgcaagccctttggcaatgtgagatttgatgctaagctggccactgtgggaatcgtcttctcctgggtctgggctgctatatggacggccccaccaatctttggttggagcaggtaagggtgtaatgatactcgaaaggtagcccctgtaggaccaagtgtggaaggtcagactgtgatctttgaggaaatcacttctgatttctgggtctgtgtggctccttgcttacaagaagaaaggaagaaactctcctcagggtctcagtgaggcacgcacatgaatgtatgtatttgcctatgacatcaaaagaggccctgaggctcactccctagacatgaaaatgtttatcttgagtataagaagcccacaagaagactaggaatattcaaaatgcccatcctagggctatagtgtaagtgaacactgggtacatttaaatttcagggccctcttaaaagctctgtgccaggcacttctcatacattttaccccaccaccttcagaggtttcttagacggtacaggaggtcatggaagccatatatatccttgccagactcattctttgggggaaatactcaaagctgatgaggcaatgacttagatgtttagcagggaggaatgagatatggacaactgattttactgttgtacatgacaatcttgagtgtgtgttcctgtggtatttggacagagaatgttctttctttgtgaagcttccatcattctgtgaaatacgccttgttaacagcttgtctttccccagaaccacaacaattaccagtaattaagaatgtcctagtgttagtgctgggggaggcttagactggattatttcatttcacttccatggttacccagtgagcattccccttcattacagacctggcacaaactggcctcataataaattcagacattcttagggtttctaaaaaggaagagaaagaggaagcctcttcacctccttatgaaaatattctagaactaagtagtgataattgcacaaccttgggaaagtcttgaatgtaataatggcaaatttcatactatgcatattttgtcacaaagagaaaagatgacatgaagaatataaatggacaaggatttaccaaaatcctactacagagttttaagatgatcagaatattctagaagtacaacactgtgtagatatgaaatgctattgacttgtttacttctaattggttaatttcttctcaatttaaaaaaccctctgactcaagtcaggcatgtgccctggctagttggggaggttccaggttgccccagcttgaattaggatgggctgctggcccttctctttaggtactggccttatggcctgaagacatcctgtggcccagacgtgttcagcggtacctcgtaccccggggttcagtcttatatgatggtcctcatggtcacgtgctgcatcttcccactcagcatcatcgtgctctgctacctccaagtgtggctggccatccgagcagtaagccctttaccctcctatcctcataccaaacttgcaagatgtgtaggcaactctgaggcacacctggtaactctcctgcctccacattgctctgatcccaaatcaagcagtccaccagagtctcttaaatgcaccccccttttatttttggagacaaggactcagtatagagtcctggctggcctgaaattttgctatatagatcaggttagattcaaatttacagaaatccacttgcctccgcctcttgagtgtgtaccaccatgactggcttaaacctttttatccctgtgcgtcttagttgctgttcaattgctgttaagagacaccatgtccaaggcaactcataaaaaagcatttaattgggggcttgtttagagtttcagaggcttagtccattattatcattatgggaattggacaggcatggtgctgagcagaccctgatccgaaggcaaagaaaggaatgctggcctgttgtaggcttttgaaacctcacctccagtgacatacttcctctaacatggccaaacctactccaacaaggccacctctcttaatccctctcaaatagtgccactccctgatgactaagcttcaaacacttatggaaggggcattcttattcaaaccatataagcagatcccatccctataaaaaatattaagaaccaatagtataggacaggaggtatagcttagtggtagaatattgcctagcatgtattgaagccctgggttccatcctaagcaccaaataaactgtgaggggtggctcttaggcagtgaaggcaggaggatcaaaaaagttcaaggttatcctctgctatatagcaaattcaaggccagcctgatatctacatagactatggagatgcaaggagttcctttgggggataaattttagggatttttattacttaaaaagtatgtacaatattttttatcatattctttcccctctcccaactcctctcagatcctccccacccaacttcatattctctcacactctctgccctctctctcccttaggggggaaaaacacaaaacaaaggtcaaaataaattaacaagcaaaatccattaagacaaaaattacccaaacaaaaagttcacaaagcaaaacaaacaaacaaacaaaaacccaatcaaacaaataacaaaccaattgtggagttcattttgtgttagacagctactcctgggcctggggcttaccctggagtgtggcagatatacctagtgatgttctgttacagaaaactgacttcccccttttcagcatgtatcagttgcaaatagcttcttagttagggatggaacttctttctatgctgaagttttgtgtggtttgaactttacaggtctctgtgctgttacagctcttaatgcagaaagggagttagaaatattgtgagatgtaaaggtaatgaatagctccaatgaaactgtcatccagacacaacaggactgatatacatataaatgaaattattgtagtctcaaaacctgacttccttgttctcactctaatgagatggaaagtgactgcccattcctagaggactcagaaagagactctctgccctctctctcccttattctgccttctccctggcccagtacagccctcccatggagcataatctacagaacacctgcatcccctcctcaggtcttagttactattctattgctgtaaaaagacaccatgaccaaagcaactttttttaaaaagtgtttgattaggggatgcttacaatttcagagggtgagtccatgataaatgtagtggggagcaaggcagcagtcagtcaggcatggcacttggagaagtagctgagagcttaagcctgatctgtaagttgaaggcagagagagatagactgaccctagcatgggcttttaaaacatcaaagctcacccctcataatgcacctcctccaagaaggccacaccacctaatcttccaaaacagtttcatgaactagagaccagatttcaaatacatgagcctatgggggccattctcattcaaaccaccacaatgaggctcttggggaagatcaagaactccagaatgccatttgcctctagacctgcttgacactgtcttgtgtctggtgctccatcttaggaagcctattcagtaaggagtccctatctcaccaatgtccctatctaggtcaggttacactggggagatgagagtaagagaatgtgtaagctgggtactgtatgctgagtgctgtgtgctcctctaatggtttccctccccagcagaaattgtctctttgttaaacaactcccctaccatttactttgtgtgccatttgttcagtgccccagcattgtgtagcacagctggcagaaagtctcattctctctctctctctctctctctctctctctctctctctctctctctctgttttgttttttgagacagggtttctctgtgtagccttggctgtcctggaactcactctgtagaccaggctggcctcgaactcagaaattcacctgcctctgcctcccaagtgctgggattaaaggcgtgtgccaccacgcctggcactttttttttgttttgttttgttttttcgagaaagtctcttaaggtggtgctttacctatatgaaggtgctttgcgctcactcctgcatgagcaggtatttacaacctctttctggagaagactatgagctccaccagaggcaccattcaccttcatgtcgtgtaatgaaggctgcaaattggttcctgtgttggtggtccaatatcagaatcaatttatctagttcccacagtgtttccctccagcttcagcagtattagctcttggctagcagagcccatcactgctattccagctcttcctttattatagctttcctgattccttttacagctgtctgttatcagtaagccttccatggcagatagtggttggcctctagcctctagaaaacctgggggaagtgtatatatggatcttgcattgccaccgggcacctggcaattactaggcctggtttagttaaagcaaactttacttctaggactccattcaggactccagactcaaacctgagcacaagactagagcttcttggaagggatcagatacagactaaattcagtctccttagttctccttcaaaagcttctgtgaaactataaacaacagcttcaaaggtctggtctgagggttgtccttggccaggccagccacttgttcccacaaggcctacataaagctagctccaggaccactctggcccccaaatcaggtcattctctgacttagggtgggaggcaggattgggatactaggtgcagtatttcctgctctccatagatccctagaatttcctcttgctagtatcctaacttggcacctgagcattaacaatagtccctccatatatagaggcctatctgagtaatccattcaccgcccttgtcttctctaggtggcaaagcaacagaaagaatctgagtccactcagaaggccgagaaggaggtgacacgcatggtggtggtgatggtcttcgcatactgcctctgctggggaccctatactttctttgcatgctttgctactgcccaccctggctatgccttccaccctcttgtggcctccctaccatcctactttgccaaaagtgccactatctacaaccccattatctatgtctttatgaaccggcaggtaagcaagagcctgatcagagcaaactcataatgacccagaactcaatgaaggttcttagctggaatcaaatcatcaataagaaagttttatggagaacctgggagtgggggttaatcatgatcctccatgtaaataagtgtggaaaggctctacatgtgacccaccctggccagacctcagctcaacaatgacttctggtatctttgcgctatctccacctgagtctggtgcttaagaaagtgttgtgcactgcaggcccttccattctcatgatcccacaactatggacaagaatcttctaaaggtgctgctagaattcagatgcatcaagaattcagtgaacacacaatgatcctagctaattctgttcctcttgtgtttacgaattcaactctagtttttttttttttgttttgttttgttttgttttttcatttcaaaccttgactttggatttttgcctccttaaaagtttagcttttcttggttacactagctaagagtccaagggattttatgagctcatgaattagtttagagtgagcatgttatgagacatgggcttatctgatggcaaccatttttagctaccatattggtctttgacacaagttgctcatggctcttagaaccccctggtaggttataagtggaccttatgaggctcatcaccttctaagtgccatttgcctctgtctttcttgaatacatcatatgcacttcattaaggagcatttactatatgagttattagtaatcacaagtgttcaatggagcctctcatttcatcagattcagtgaatccttccaattgatgcttctttcccctctcatctttcttcctctggtacttgggatggaacacaggccctggtgcatgccaggcaagtactctaccccagatctcctcttccaaaaaactgaaagcagtcctagaaagaaatccttgtgaaagacaagaaacaagagtaggaattgaaacacattcttctgagcaggtgcacaaattttgctttcactcattctgctaaattacaagaaaactggagcaggggattcctttcttgttcactgctacatacctccagaatagagttagagttagacataaagtgaaaactaggtatatcagccagcttttcagccaaattcatgttgttattcaacccatctctgatgttctcagtgtgaacacttaagtattctcattttgaggattttaatgttacagggagtgaaatagagctgaagtttggggacacttttagggttctcaaagctttgtagttaggtttcttagatggcattggtttgtttgggtttttttgtcactgcctaaatatcccgaggttatcacaacaaattccacaaatttcatggcttaaaacaacagaattgtatagctctgtgtaagagaacttgcctaatatgcacagagtcctaggctaagttcctacctctacagcaagcaagcaaacaagaaaatagacctagaaccaagaaaatagttgtagaacaaaggaagctaggagaaatacattaagtttctcacagttccataggctagaaatctgaggtttaggtatcatctggcctctggaactgtgggaatcttaatgtctctctcctaacttctcttgttctacaactcataggcatgctgctccaatattatagccctttttctgtatgtttagtattgtagaaattatttaattccaacccagggtttctaccctgcctttgatcatttagttcctgaataaaaaaatacacacaacctttatatttacaataagct

SEQ ID NO: 72 - DNA, 1225 bp, Rattus norvegicus
aacccaatatggcatctttcatgaggagcttattttctgaccacagcagatatgttgaatcttttcggagatttctaaataattcaacggaacaccagtgcatgcaggaattcatggataagaagcttccaggcataatagcaaggattggagaaacaaaagcagaaattaagattctgagtataggcggaggtgcaggtgaaattgaccttcagattctctccaaagtccaggctcagtacccaggaatctgtattaacaatgaagttgtagagccaaatgccgaacaaattgtcaagtacaaagagcttgtagcaaagacatcaaacatggagaacataaaatttgcttggcataaggagacatcatctgaatatcaaaaacgtgtagtggaagaagacgaagaacctccaaagtgggactttattcatatgattcagatgctatattatgtaaaggatatcccagccaccctgaaattcttccacggtctcttagctgccaatgctaaaattctcattattcttgtgtcaggaactagtggctgggaaaagctatggaaaaaatatggattccgcctacccagggatgacctctgccagtatgtcacatcttctgatcttgctcagatactggacgacctgggtattaagtatgaatgttacgaccttttgtccactatggacataacagactgttttattgatggtaatgaaaatggagacctgctttgggattttttgacagaaacctgcaactttatcaaaacagcaccactggacctcaaagaggaaattatgaaagatcttcaagagcctgaatttagtgttaagaaagaggggaaggtacttttcaacaacaatctgagttttatagtggttgaggcaaatgtataagtcatgagtattcagaactcatattttgaccaaatgctgatttatttacatattaaatacatattatttaaatattgaagttaaaattaatcccataatagaatacaatattatttcttataaatgaaatctacaagtttccaagacaacttagactttctaagaactgagccacttccagttgtgaccttaaaagctaatactcaggctaaacactgcccaactggaaacatgagacttgagtttcattagcttactgatagtaaagttctttccattttcttagtgtactggaaatttttagaatagtaataaaatatgtgtcatcc

SEQ ID NO: 73 - DNA, 707 bp, Rattus norvegicus
atttctcatgggcacaccttggcagggcctgaaagatagagttttaaattacctcaaagctcagcaacaggatctgactcaggaagacagattgttaaaaatgcaggagaactggttcagagacactgaccctcccgcttaccaccggactgagtaaacgagtaatgggttttgttctgcccctgtgtgtttgttcaagtcccctttgtgccctccagccattgtgtcctgcagagagtactcctggaatccggctggccaaacctaaccagatgtgtttcagatgcagatgcctcatcaactctgacaaacttttaccctaaaggacaatcaggatctgttctcaggagaatgcttgacctttcccctcatttaaaccctagagtcttaagaacaattctgtgactttgagagtgtccccttgtgacatttttggtatttccttttgacatccccccatctcctggagcttgtgacttcttcctttaaacagcccttatcccagccactcggggtcgacacctcagtctcctgcgtgggatacgtgttggcccagagatctccgtaatagatctccgtaataaacctcgcctttgcgtatgacatccaaaatggtctctctgtgtctggggtccgagagttcccgagacttgagtaaaggtctctcttcggggatctttcaggcccactaaagataccccagcccc

SEQ ID NO: 74 - DNA, 9602 bp, Rattus norvegicus
gaattcaggatgttagtccttcaagtcctttttattgtataagatttttatacctgtactgggtgggggttatttccatatgaagttgggaattgctctttcaagtcctgtaaagagttgtgttggaattttaaagagattggtttgaatatttagataggcattggtaaggtgaacatttaacttggttaatcctaccaatgcaagtgcaaaggagatcttgccatattctgatatctacctcaatttcatagagactggaagttcttgtcctgcaggcatttcctggctaggttgaagttaacccaagatatttcacattatttttgctattgtgaaggatgttgtttcttaatttctttctttgcccatttaatatttatataaaggagggctatttgtttggtttttctctttgtgttttagttggtttttagtattcattttgaaataatttagacaatggaggaaaaatgtaaggttacagacatgctgggacacaagtaaggcagaatttgtacactctacttttgtttttgacttctcccactttccacattgactttgagccactcaataaataaaagatgtgttcaagagtacagtacgcttctactaatccatgttctgagaaatcatcccgtctgcccatctgtaatctgaacacaaagcacaggttatccaaggcagtatttcctaagaggagggaggagccttggtggggataaatagccatcgctgtgcacaagagagcaaaacacaccagggcaccctgaacatcaggagtcggcaaacacagaggctagtagctggctggtatcacctctgcaggtaatgcccagaattcctgcctccaggtacagaaggaaccttcccaggcctgtgtggtactggctgtggactgcaacatatgtttgtgggagtggggaaatggctttggctgagatactgggttagaaacacgggacattgctatggttcatgaaatctcctcttttgtttctcttgcctctggatgatgcagatactgtggtctatgctcatggagagtaatggagcctgctcctctgactctactggggagttttgagagcttgctagattgcctactgctgtcatagcaagggtgacacaggactgttgccgaatcatgctgggggaggtggccattgtaccatgctcacatcacaaaggagattactgtgggtatggaccccacttcccggcctagatcccaaatgccatggccacactcaggggtttcgccctcaacaaaggaaggaaagaaggttcagttactgagtcagggtctcctgctgtacaatcccagcagtctctttactctggaaataattttggcagaatttattgtttagtgccctccgaagaaatgggtgcatcagtctgaaacaaaagcacaagatgaaggcagccaagttgttgttgagatccctggcttcactgcaggcatgtcacagcaatggggacaggtggcttagcaccagcacaccctcctgggctctctccagttccctgtttgcccttcaagtcttctctgcccccaccctgtcttccctttgttccctcctaaattagtctccctcctcatatctccctgttcctctttttcccaattctctctaactcttccttttacaaactttcctctatcctctcctctcctgtcccctcctttctgtctactctcccctcttttctctcctctgtcttctctctttcccccttcttccttcctccccttgcctctgcccactgtcttctctcttacctcctctctcctctcctaactctcctcttacttctcctctccaaaatcccccttcctctctcctatctctccttcttcctctgcctcacctgcatttactatgtgtcttcactttacacttccaaacaaatggtcagagatcaaaggtagataaccatgattactatagtctgtcaggatgagtgtggccacaactccaggggaatatgaagggaaatgaagcccctcgaatggttgtagatactccctacaaccattcccaatgcccacaataagccagccacataccagtaatgtaacctggacccctcaccaggcagcacagagaggtctgacaatttacttgctgtgacacagtcatcatgacagccaatataaaatctggtcgaggtgcgagagtctggactcctgcttcttaaaaccagcaggacttccgagcctgaggtacaaagcaccatggggttccctggcagggcagagagaaccttcctttgtgtgtccttccactacaggttctcaaaggtccaggatttccacactacatcagatatctctcctgcttcctctcgactaaccctcccccatccctaacttcaagcaccaaaggaactcaggggacttaagatttctcagatttgaaattgaagggctaagatagggcctgtgataaaaactgctccaaggatcctgagttttgcctaaggaggtggcagctacaggtggctcaagtccaaagtgcagacaaggctcatgcccattcgctattctgccttgctctatgaccctaacatatcccgtcaaatcactgaagcttggttttgtactgtgaaaatgggctagtgcaaaagcatgtcatctgtggtagtagggatcatatgatgtagtgatggcatgagtcaccagagcacttcctgtgggcagtcacaaaagcatgaagtggagtagagcagggcacaataccagccaggtgggaggactagaagacggttgaagcaccaggcgttcctcccagtctcaacaaatgtgtcttctatttttcagccaggaggacagagaagatggccttcattgcagctttggggctcttgatggcagggatctgccctgctgtcctctgtgatggcatactgggaagggacactctaccccatgaagaccaaggcaaggggagacaactgcacagtctcacattggcttccatcaacactgacctcacattgagcctctacaagaagctggctttgaggaatccagataaaaatgttgtcttctcccctcttagcatctcagctgccttggccattttgtctctgggagcaaaagacagcaccatggaagagattctagaagtactcaagttcaatctcacagagatcactgaggaagaaatccaccagggctttgggcacctcctacagaggctcagccagccagaggaccaggcagagatcaatacaggtagtgccctgtttattgacaaagagcagccgatactgtcagaattccaggagaagacaagggctctgtaccaggctgaggccttcgtagctgacttcaagcagtgcaatgaggccaaaaagttcatcaatgactatgtgagcaatcagacccaggggaagatcgcagaactgttctcagaactggatgagaggacatccatggtgctggtgaactatctcctctttaaaggtgatagtcatcactgcctggggagtggagggagaggatcttccgtgggtgcctgtgctatacaatgatcactggaaaggaggtgctcaaagccttggagacatgggtgcctaacttcttgttactcacgactctcctcttctgaggtgtttctggacaatggtttgtgctcctggtacatgctcaacagaagccctgagctctcagtctacaggagctgattgttcaatatgacttaagcttacttacaagcagaatgtcataccttacatgttcagtcctacctgttgttcagaagcatggctcactccggcggagtcccattacaggcatttctagtatgttcctgtagtagaagtccataagtgctggaagtctctgactctaggagagtccatgtgagcttgggactatttgatcataaggagcctggaaagtgtaacatggaaggtagcatatcccacaactaatgaagaacctcgtgggcagttactctgcagtacttcacccctgagccttttctgtaatgaacttgtcccgggcatggagaggcagggactgggtaagaggtcactagagatgtagtggtgtgggccaggcagtgttctgtgcttagtgttagattgttttgtgtaattttgcttttgtaaaataaccacccacttagcatgaaaagtcaggattcccaagacacattcctgagccagactctgatgagatttaggtgcaagatagatggaaactcagctggaaatgttgtaggtaatggtactggggggaaatccagagatcccccatgaacaacatcctgcttaatagagaccagggagcaaggtgaccaccctgaaatttgtgcctgacagaaggcataatgtgaccagacgtggggtgaagagaaaacatgattaaagttagtccaggttagagtagggcgatctggggttagagaaagaaaatcaaggtgacaatggagagaaatgtaggataggaggacaagaggacagaagacagagaacaagagcacagaggtcttgatgtcccccgacctgatgtgggcaggggatggtataagcagagtgacagcctgaaatgtaagatttcagacatgtctctctcaactgtcctcaggacactgggtaaatactgcttggtgtgagttgggatgtatgtttaggctgtgagattccaggaccaagaaatgttccactgtagtcccacaatgtacactgggtgtagtaacataaactagaaatctggataaacctgagcaggtatttgtgatttgtggagactgccatggcccataaggcttcttacccatgattcaggcacagactataggattatgaactggtcccgatatgggggatggaagtctctgctcttctctttcccctaaaacctatcctaaaagcaattgtctcctagaaatggttctcctgaggaagacaggaccctcaaggctccacaggcttcaccatcttcactgtctctctcttactcactccaccccacatccctgactgtgtctttagtccaggcagccaggctaaggttttcaggatccgctgtctaaaccattcctggagacaattctcatagctagcagcctgatcaactacttgctttatccggttctgcacatgtcacaataaaggacagtctgagtgactgaagatgaatggatggaagccacagctcaaaagctgagcctagatggggaggaggtggaatatttgtcctgtggctacaacatgatcatttgcctcattttaggcaaatggaaggtaccatttaaccccaatgacacatttgagtctgagttctacttggatgagaagaggtctgtgaaggtgcccatgatgaaaattaaggatctcaccacaccctacatccgggatgaggagctgtcctgctctgtgctggaactgaagtacacaggaaatgccagcgccctgtttatcctccctgaccagggcaagatgcagcaggtggaatccagcttgcaaccagagaccctgaagaagtggaaggactctctgaggcccaggtgcatgtcctgaggacccagagctgtcattgatccctgtcctgctgttcctgatggccagtgagggtgtgccccattgtcacagcagtgtcctatgtaatggtggagatgccccaggggacaggtagacttgagttgaatttcccttctgctgactatgtgttttgggccctgagttgctgtcgattttgttattcacaggatctgatcagctagaataaggatctcagagtccctccctctagcaggctctaagttacagggaatgtagaatgagttggaaggccaagggaattgtgattgataggagatgaactctgagaatcagctctgcctgcggatccactttatcctctcaacactgcaatacgacttgaagacctactatgtgctgtctgttatagactctgaaagtgtatcagagacttaagcacaaatgtactcttcggcctcctcttggaattgaggaagaaagaatgtaggcatgaaaattaaattaatcatcatttagtaggttaaaacatgagaaagggtgacattaagaaggggagtgtccaaggattaggaaatctagagtctgatgcagtgtgcactttaaaatagaagatgttttagggttgctgcacctggggaggattccatttgtgaatctaggaggaaatcattcctagtaaaggaacagctgggaccaagtcaggttacctgtctactgttcacactctccagtcactgatgaataattaatgtatcagaaacagcaaagatacgtggcctacacatgggtggaaagaagacttcactccaggaacacagttgtctatggagagaagcctcagggacaaggtggattgatggggacatggagtacagggacgcttacattgctattttttattctcaggattataagtgagcttcgcatgcccaagttctccatctccacagactacaacctggaggaggtccttccagagctgggcattaggaaaatcttctcccagcaagctgatctgagtaggatcacagggaccaagaacctgcatgtctctcaggtaagacaagaaacacagggtgcctcacattgggtcctcaatgtggatgttgaaggtcatacgggcatgtggggatggttcatgtgtgagaacaccgacatttctgatgttccctaacaaatgtccatcctctactccctgtacctaagctcacctaggagaccattgtgggggaagagactgtagttgctttatagaaccattgataccaacctgtgctatactgcagggctgcacacagtactctgcagggttacccaaatgcactgcagatctacccacaatacactccaggaccacccacaatacagtgcaaggccacccacaataaactacagatctgcacacaatatactacagggccatctacaatacaccgcaggttccacccacaatatacttcaggccaaatcattccaagcctcagcttctttaatgcagtgctgggatagatagtacttcttgaccatcatacaaaatattaacagtaaaagtaataacctgaatctatggtacttctgatgaaaacccaagaataggagagagatgccttagacgctcataccacatccctagctgcacagcctgtcagtgtccagtgttctgtccagggccccagatccctgggctcagatcttgcccagcaggacatggcagtctgggaatgtacagtcatgccctctcgattgctgctgtatgtcccaaggagactggagcaccagggatgctgaatcctgcactggctgccagcaccgtggctgttctctctgaaatcgttgggaatctgcctgtgaggaaactcctgctgctgcctactgcctttcttcagtttgtagtgggtttgagtgcagcacagattcagacactgagcagaccacagcatgctcatctcataccctgagcagtgacttggaaatccatggttgcagctcaaagaaggaagaaagagactcagcagcagaagaggccggcactcactgcttgctccagaccccgctcctgccctctctgatgtctactgagtgatgtgtttctctcccacaggtggtccacaaagctgtgctggatgtggatgagacaggcacagaaggagccgctgccacagcagtcacagcagccctaaaaagtttaccgcaaactatacctcttctgaatttcaaccggccattcatgctggttatcactgacaataatggtcagtctgtcttctttatgggcaaagtcactaaccccatgtgagtctgaagctccccaaaatctgacaattctgcccaggatcctggaacagagcctggatgctgatctctgtatatgccctgacatacatgctctgattggctattgcaaagttggcttagaccagtgacatcaactatctctatggctcccatgtgcattggagcctttggattgtcagtgtcaggcacttaggacccttgggagcatctacacatgtttctgaacttggaatctttctttattcttcttccctggtgactcctctttctgtgttcataccccaaaccaagccattgataagtcccagtaaaggttctgagaacatctgttttcagtctccagagtcttgatgaaactaggctagctctgggccaacccatgagactcaggcccaggactgaaggggaaactgctgcaatgaatgtcattcaagcatctgagaacctggtatcatgctcttaagttatgctttcccctctaaaggcaatgcacacagtgccccttgcagtttcccctgacactgcccacatctggcacagtgttggagctctaactcctgcagcagcaaggggcctgtgggtcagaccagatcctctctccctagcactcctcctactcagggccaagtggtaacctctctaagtttgcagctgaccaacctcagagaaaagatgaacaccacaaaccaaaatgaaaagataggaccaaagggtcaataagcatacacctgcacagaaagctgccaggcagtgttcacttagctcctgttggaagaggttgcctctagtgaaaacatagtagtagtgatagtcattctctgactcctgtgatggccctctgacttacatgctattaacattccctttatgaatgaaaaaactgaggcacagggaaacttagtttatttccatgactatatattatggcttgtggcatgcatttccaagtgtcctaatgctggaggaatagttgtgaccttgttcttcaggcattattgtggtgggcaggtggagaaggaatcaggactctgatacttcccagagaagaaccaaatagtccatagatccagtgacatctctgctgaggtgaatgcaaggggtgtgagacggtgctcagataaccacagagaatgttttgggcagggcaaaaaataatgaagccatttctgaggatctgagaggaagtggatttctgggacaatggagtagagcaggagaggtaggaatggccacagcggcaaagagcctgactccttagtgattctggaataatttggagacactgggagtgttggaggaattagacagtttctcacttggtaaaggtactctatgaggttacagtaccgagaactgagttgtgagaggtgaggagtgttactaagggcattcaggttggggcacctgctgttcatggagaaacttcggggcctggaatcacagccagtgatctacatgaacagggacagctacacattcagtcgagacttgcttgaatattaaggctcccgagaacacccattgagcagtggccatgaggtcatcagagaattgaagccctgtgggccacactcaggaccccagtccccagtattctgtgagcactgaagtaccctgccctgatggccatgatatgagagaagaagactcatctattgaaacaatcaaatgtcccagcagacttcccaatgtgtctgttaggcatcatcctgagactgggacaccatttccattcaatgagcactgactagttccagctctatccctccatccatcctggatcc

SEQ ID NO: 75 - DNA, 85548 bp, Mus musculus
tccttctatagggttctgtcctgacagcacaggagagacgtgttctcaacccctgtatttgtaaatgtacctccttggctgatgagggattgatttcattgacggagtatgaatgcttattaaatagagatgtattgacatgggctgtctttaccatgacccatttcactatggagtttgatttctgccaccaagtccaacacagaatccatttctctgaatggtagaacacctgctgttgtgtaggtaagaaccctttttacccatctagcctatttgcttcttatcccctaccattgtaaaaaaaaaaaaaaaaaaaaaaaaaaaaaacttttaaaggaagatcactttttgtctgttagaagaactagagaaacattctcagaaaattcaacaatgacagcaatatagataaattaaagcatacttcatgttgccattcagtggggcagtttatggatgtagctctctgtggccattaaaaacactatttatctccaacttgccatctgcctgctgcttctgggcctgtctgtggtgttagcaaagcgcttagtctctgcggccaagttccctccagcaatctcatgacactgggggagactcttatgggaagaaggcaatttattttagcagaacaaccacatggctaactacacacggcaattatacaaagcaaatgcatcaacttctgccataggaggcaggagttccctttctggtcatcaataatgaacattcttcagtaagtagggaaacatttaccaaataagatggcctgttatggatgggtctccaggacagctgagaaaccgtgtgtccattgaggaaagagctgagccaaaggggctgctgctgctgttgcttgaccttgctatgttgttctagaggtgtcctggaaccagtaggagaggtgaccctttgactctttgtgcagaatgtcttgtccacaaagatgtggcccggtttttttctgtattgagattccattgcttcctttcctggcagcggcataattgggaatgccgtgaaatcaaaggaggaggaagtaaattagagtcgggaagtgtcaagttgatgtactgctgtgttgggggtgggagttctgggcacattcagtttctccatgagcaccctctcccatggcacccaccattaaaaacccttgttcttacactcctgagatactctggaattctctagaggcccctctttgcatggaagctgactgtaatgatctatagatacttcttcagaggatgcttttgcagctgtttagatgagttaagttcctcaaaaggtgttgatagtttaatccctctgggtggtacttcatatggagagacagcaggctttgcaacacactcaaagctctgacaaagctcttggatcttagtcaccttgctcacacatgggatgtggttagaacagatgtggaccatgcttgcttaaatgcacttttgtactgaggacagcttgccactggccattgcctaattaatgttcaacacccctaatgagtacctatgagtagatgagtattctcatttttttcacaaattgatgcctctaggcagtgacagaatgatagcatgataaactccaaagcctcaggcagagacttcattttggatgggctgtgcacagggtggcatggtagactaataatggtaacacaggctattaataacagtgtgatgaagcctgtggcttctcagctggcctaggctgcaacctcactccagtgttttagcagattcctttaaaattctgctctacttcatcatacttccatgaattaaatgcacatatgcatctcttccaataaaccacaaaggacacaatgctgagaatcaatttggcaatgacatgctctttctgaacttttaaaactttattaaactgttaaaaatttagttctgaaccaataagatggtcaggccaaataagtcttatgacccaagtccagtccctggaacccatataaaggtggaaggagagacccagttccacagggtcaccctctgatcttcacaggggtgctgtggcatgccattattgtggtttgggtatagcatgtctcccatagagtcacaggattaaacacttggtccttagttggtgatgctattttaagaggttgtgaatctttgggaggtggcaacttgctggagaaagtgtcactggggtgggtttggaggttttatagctttcttggtatttgtttctctgcttcctgagtgcgtatgccatgtgatcagccttcgcatgtactgtgacctgttcctattcctcctccctatcccttcctagttgaaactattgttttgtttgtaattaagttcatgaattttaaaaaatgattttaaaccaatcaatagcatcgagaggcaattgcttgtaaagagctgagctggatttagtctcttttcctcaaggatttactatctaatgggaaatacaaagacccagtcaattgccattcaggtttatcagtgcaaaaatgttaaatatgtggggaccccttacagtctggggtagtaagaaagacttcttaaggaaatcatgtcaaatgatgcctaaactaatagctaaaggacaaatagaagtcacccagagaaagtcagggacttgatgagggcacacaggacacaaggactgccattttgaaatttcagaggacagtctgtgaaacattcttgacactaagcagcttagttgtatatatcaattataccttaaagaaagatacctgttcactcttctacacttagaagtgacatcttcatgttctgaagaagcaaattctcctgattacagacaagaaaagctagataaggagtcaaagtagcatttcccatgacatgattattaatatatgtcatactcaatagtcttaatctggtcttaattctgtaacaaagaccctgagactgggccctctattagtaacatacatttattgatcatgtttataaatcctgaaaagtctaagatcaaggcactgctagatctagtgtcttgtgcttttgagatggtgttttgtttctgggtcttcatatggaggaatacagaatggcatctgagagggaaaattctctattctcacaaaacaagatacagaaaagctgaactggtcaaaaccagcctgggcttgatagtgagatcttgtttaacaaaactaaacaatcatgacagcaacaaaagatcaaactggtcttttcaacccttattacataaggagccagtccagccacttcagcagagccactgtcagtccagtcacatcagaccagccacatcagtggagacacaccagcccagccacatcagtccagccatgtcaccggagcctttcctcttcctcttcctactgttacctcaggggtcttgtttctgtttgagttctggaggagccacaatattcaactcattgcaggaagctaatagaatggaatgaatacaataaataaacccaatgaatgatacagggacagtgctctaactctgagaaatatctagaaatggaagcctccagaaattgatgcttggtctaatatgaacagctttttaaaacaagttctatagagatagcgcataagtaaaactcagaaaaagaaaagtctccctagacttgcccactcttatcctccactatgtaagcagagcacactgccggggagggaacagaccttccctgaatagatgctctatcgtgacaccatggaaggtctgctttctatgattgaaaggagacatggtgtgtaaaaaccaccaagaattccatttcccagtagccaacatggctttaacataacaagaaaagaaaagaaaagaaaagaagaggaaagaaaaggaaagggaaggaaaggagagagggaaaagaacatcaccaagggcaagttctgagtgtcacaatctcattccacttcccgtccactctctcagctttcatgtttgtagcttgcagcttgctgccatgcttgccttctgtgatggactccccagcacacacagaaaaagctgggtgtgtccacatggacctgtaactccagagctctgggtgggaaaaacagaagcaaccatgaggtttcctgaccatcagactggttcacccagaaaccctgtctctgaaataaagtgggacatgatccagcaaacatctagtgtcctcctcctctggcctcacatgggcaggtgaaaccatgcacacatgttcacaaacaccacaaacactaagataaaaagaccacaaagtaatctcactacactttaattaaaccatctgaaataagactgctgccaaccgcaaatggagacaagaatacagagaaaatagatctttcagacactgtggaaggagatgcaaaatgaagaactgctctgcaaaatcatctggcaggtttaaaaataagcaacaacacaacattcacttagcatatgatccagccatggccattcccactgtttattccaaaaaaacttctgtccatcaaagtctgtatacacatgctgctcatagacgtgttttgtataacagaaataatcaaagtatctcatggtcggtataatacacataatgccacccagcagtaagagtgacaacttcatgaactagggaggcactggccaagaaaagccaatctcagaaagtctgtgacttagtttctatttctgttgcgagaaaatgactctggaaaaagcaagataagggagagaagcttttgtttaactgagttcaaggtaactttcttctgcggaggcactcaggcagggcagctggggcttgaagcagcgctcacaccttgtccatggtctggtgacagagaggagaatgcttctgtgtacttagtctctccgatttttcatagtctggggtcccctgcctaggaatttgcacaattaagatgggtcttcctatatggaataacaaaatagtccccatagtcatgaccagaggcccaactcccagacaattctatgttctgccaattgacagcagtaaccatcacaaccacagaccaccagagtgtttttacttaacattttcaaaatgatgcagatttggagatagacagcaagctgacttcttacatctgcagattctataccttggattccaccaattgtgggttgaaaatatattttaaaatattatatcccaacagaatatgtacagactcttttcttgtcattattcattaaataatatacaactacccacatagcatttgaatgtgctgtatattgtaaatctgcttagatatctgttgattataggcaaatgtgcgactttaagtaagaggcaaatattgggctttgttttctttagaggaatttcagagccaatccttgtcaagcaggagagacaaccatacctgttagtgggtttaggatgtagggaaggcccacaagagtaaaaaggataacatgaggagatccttgtagcagggtacatttctctgttgtgatcacagttatggttggctacactaacgagaagatgcatgattatccgtggacttgatgccatgttgatcttctgaccctctggctttgtggatataagctaacatagcaatgagggaaatagcataggggctgaagaggacctgtggtctttctataccatctttacaacttcctatgagttgagagttttctcaaggagctagtaacaagtaaatataggtacacatgcatatatttttctttttaaattttttttattagatattttctttatttatatttcaaatgttatcccctttcttggtttctcctccgagagcccccatcccataccccctccccctgctcaccaacccactcactctcactttcctgtcttgagactaccctatactggggcatcgagtcttctcaggaccaagggcctcttctcccattgatgcccaacaaggccatcctctgctacatatgcagctggagtgatgggtccctccatgtgtactctttcattggtggtttagttcctgggagctctgcaggtactggttagttcatattgttgttcctcctatggggctgcaaactctttgctccttcagctccttcagtcctttctctatcttctccattggggaccctgtgctcaatccaatggttggctaagaacatccacctgaatatgtcaggcactggcagaacctctcaggagacagctatatcaggctcctgtcagcaagcacttgttggtatccataatagtgtctgggtttgctgactgtatatgggatggatccccaggtggggcagtctctggatggtctttccttcagtctctgttccacactttgtctctgtatcgcctcccatgagtattttgttcccccttctaagaaggacaaaagaatccataccttggtcttccttttcttgagtctcatttggtctatgaattgtatcttgggtattccaagcttctgggctaatacacataaacatatttttatataagcaaagcacaacaaaacatttctatacatcaatttggaaaacacattaatacttgatactctcaagtttgggaaagttcttgagatggatggccattttgatgggcatctgatagctatcacaactaaccatagacagggcattcaagagactccggggctcctaccagagaaacactcatggggagaggggagaggtacatgtatttttgcagtaatgttacagtgaaagtaaaacattaagacagactaaaggtttatctgaagcagaattataaagtaaaccatggcttattcctataaaaatacagaagttgccagagttgtggtggtgtacacctttaatcccaacactccagagacagaggcacatgaatctttgagtttgaggacagcctggtcttcagagtgagttcccagacagtcagggtttcatggagaaaccctgtcttgaaaaacaaacaaacaacctccccaaacaaaaacaaacaaaaagccgaagtgaaaagggactaaccacatgaagtcaaagcaatgtataagattttataaattgggtggcacgacaaagccagatagagaagcacacgtgggacctaaggccattttaaagtaaacctcaaggcaaggtatatgtatacaaatttagaaatgtctgtgagttatgaggatattaaaatcaaggtacagccacagcaggtaaactcatagtcatgctcacagctcattagaaaggatcacgtgctcacgacgtggcacatggttggctagatagtcatgtgactggccatgcagtggttgttaaagtttattttattttaatcaagtgattcttcaaaaacaaatgactattagtatcttggtatttccccccctgttttctgtgaatattttagctttggtatgagtatgcatatttgtactgttgtcttattttgagatgagtttctttacatagcccaggctagccttgtattcccccggtctcgtgcaattcctgctttagccttctaggagtataagcatgcacgcgcacaccaggtttgtgggtgattttcaatgtagaaagccatgtgttgagcacccaccacggtctcaggacaatcctgtgattgcccctttcattttactttaaaaactaaagttaaaattgaggactgaaggggataagatttgaaaccccaaatatctaatttgattacaacaaagaacctggcctgtctaagtgagatgccttcaacacattctactgctctacttgaatctagcaccatttgtcctgtgtagttctttttgacatttgccaaagctggcaaatgtccacatagcagactgtggaaattcccatgattccctgccaatgaggctgactgaatgagtaggtcagcaaccacactgcgtctacttgggagagaaaggatactgctacagctgacatcctttgagtaatcaaagctttgtaaatattctgataaacgtttccttagaagctgtttacctcaggagagcgctgtaggaaagtgggtgcttcctggaaaagctaagagagactttctaagagctattgataggagtctaccagggcattggatggagagtcttacattgttgttcagtctttttgcttaactacaactaccacagcaacattaacacctgctattacttccatattgcccatatatagcatgtagttctagaaagtcatttagttcttcattctgctaacctagtgttgaaggtgacagtataaaggagtgatcttacttagtatagttcagaggcaaggctatgggctccaaatacagggataattttaagacaattggtcaagttctctagtaacataagcattctggtattacacaactgacagtcattccaggccctgtgtagggggcagggtgaaagaaatgataacatcaggtttctgatacgtgtcagagtaatacactggtttcctgagaggggcctatgctgagctctgtcttgtagattgactggtagctagtatattaatatttattgcccaggttactgtttgcaacctgaacagcagttctgagtgatctttagctgggacacagataactggatgttatgaaggcagggtcagtcctgtgggtacacgtggtacttctatactgagcaaggacactgttcagtgtagcacttttgaatcttatctagcatatttatgattcaactctgaacaagggctattagaaatgtgccccttgccctgtagaataattatataaaaagagggtgaaagagcaagcaaagctgtccttggagtcactcagtcctcctaaaggagataggaatggatttgtaaaaatcctctaggggtaattctaaaaacaaaacctcagtttgcaaacagttgaagccacaagcagtccccttcattctttagggatgtgttttctccactcgccaagtgagaggcttagctagtgacttgtccttacacaataggaagtcggctcagcaaggtctttgaccccaacaccagacctgctcggctaaagttatgtggaagattgagcaatattgagaaatggttcagcttcccaagagctcatgggggacagagttccattagcagcaagatttcactggctgttcatcccatagggagtctgctgtagtacactataaggagatttatgcttcggcagattgccttctgcagggttggacatcacagaacctcggggagggagaggaagcctgaaaattcaagtcaatttcatgatgcactttaatgtataagaagagaatgaataaaaatacaaatctctttgaagatggtactagagtttgttttcaaagggaaatgctcatttgagaagctctactttaaagtatagacttccaagtacagactgagaacttggtgtgtaagatgctcagcgattaggcacactgtctaatttggagccagactgtctaggttcaaatcctggctggatgtgtgatgttggcaaattgccttaaactttctcccttggaaagtgaaaatgtggtactgaggccacattataaggtgtcctgggaaataaaggatattatttatgctatgcagaaacatgtcagacacgtggaaaatctccaaccatggttgatgttattttgaaacattcttttactttctgcctttcctcttacttaaagttaatctttctaggaaccttgagtccttctagttcttgccaaatggtcaatgagattccagatgaactttctgcagtgctaatgaacatatatgtaatagagttcatcacaatagttctgacaatacaatggaaacaacaatacaactgtttgttggctaagatgctattcttccatgtaaaatctcagctcatctccccattgttatgtaatttggagaaatctaaaactcatctttacctatggggggatggattgagtaacagaagccagtcatagtaccccacttcctccatgctggttatggtttagaaacaagcttgaaacatgtctggaagctgccggcttgggatcttttcatctttaaaagtgatacagaggaaagagaccatttatttcccttgctgttctttaattttctttccttctcttttccttccttccttccttccttccttccttccttccttccttccttccttccttccttccttccttccttccttccttccttccctccttccttccctcccttcctctctctctccctccctcccttccttccttccttccttccttccttccttccttccttccttccttccttccttccttccttccttccctccttccgttcatcttcttttttacaaagagattaaattcaccagttttaaccacccatcctcagacttgcctatgacatcgtgaccacacagaactcctgcacatttcctagacatatcagctcagcccaccctcagggcctttgcttctcacttgatcctattctcctgatgctctttttttactctttagtttaatcttccgttgaagtaccccaactgtcccctctttagggaggcttttatgatgctgtggcaccccactcaccctgcagcatcacccctttaactgccttattacaatggccaccatctgaaacaatgatgctcacattaatttgttcccattaattgagctctatagtttgttcagattcttttgttttgctgaatggtctctcccctcccaggatcccacaagagatgctatgagtgtttctaggcctctttatgtaactctttgctgagactgttgctcaaacttggtaaccttgacaactgagaaagttttgtagggcatcctccactgggatttgtctcatgattttcttgtaattagcctggtgttgtgggataggaccacccatgtatcctctccagggtccaacttcatgtttcatttttagttggctgcctacctttcccattgttagtatattgggctgcacaaaagaagggcatcattcttctcaaagctttgttcctagaacctagaatagtgtccagtacacagtgagcctcattatttgtcaatggaaacaatgaggtaagtagaataaatggccaattgctgccgactgtctttgcatgtgaaatgaaatatgggtcaagaagatccattgagcagaggtcaaaggcactaaaaccctttcaaataatatggcatatccatgagataaatctaaaccctcatgcaaataaataattaacccagggccaatggcacatttaaaatcattaatgaaaattgattttccttccctgtagggtgcctctctctactgtatcaccatgccctctgcagagtcagccaggattcttttcctgttttaacttgcatctacctagagtcttccttcttctgagtggtgcctgcctctatacagcttttttttttcctttgaaaatatttgacttggtcatcctggacaggaacacttgtgggtgacctgcgtgggaaggctaaagaaagaggaggatggagccccatggctgatgcagggctcagccaactgacttggtgcaaagaggagaaaggggaggagcctgttaagctggctaaatgcttttccaggaacatggtggaaaatgatatatatatgcaaatacacgagttgatagaacctgggagcatctccagttctaggcattagaacagtaaccaccagtgaggactccctcatgatcttgaagagagttcaccctcaggctgggagaactcagagaacaaagcccctgaagggagaactatttgtattccgttcagacttcctttaacctttcattttggaagccccagtaagcaaaggcatatctgtcaaggtttcaggatgaatgaagaaagtgcctgtgcattatcctcatagatattcagaagagcttactggaaagctatatagtaggaagacctcatctctaggcagccaggcagtggtgtgggggggggggagtctcagctatgatcacctccaaaatgtcaatttcctgactgtgtgtatagcctcccaatcaatttatttgaacacgaacttccctaggtaatcatctgcattgtctatcactggctagaatgtttgcttttcttagcattccttggggtaggtgactaccaggtcaaatatcacacagttacaagagaagattaactattacattgcatttcctaacttcctactgctgtcacacatttttctgtttctttgacacccagatgccacaaaggggagtaccactgatttcatatttcatatttaagacaaaagaaacaatcataagacatggtctaacttcagaaacttcatcacagagctaaggaatgacatctgagggagacagatgtcatcatgtgaatgctccctggggaccctcgcctgcagagccactcttcccaccggtgactataagggctcctgagctctgactgcaggatttgacctccagctttctttcaatgagctgattgtggaggtagcttgggagaccagttccataccactcctgctccagcactgaatcctgctcaagctgggcagcatgtcaggagttgtgggccaacccctttattccagaactttctcttggcaggttccatagagataggccctcaatcctgttgccactacatttctgctccacaccggtcaagcttctcatcctaacttggtatatggtagcctggtgcagcccatcagaagaggcatggctctgagctcaggtggcacctgggccatggagtcaggcagacccgggagagttggcttctcattgggcttcctatattctttgtagtatatgatgagttcttcctcagtccatcaataccaacatgttgacaggtattatcactggagcactgtcttcagagactttccagtgtgtcagatgtctggctatgtggctacattatgagctcacattttaccaaataccctctgggctgggtgttaatgtggagtctctcactatcaaggcaagaaaagccttctccatgggctcttggcacatgagatagctagaaaaggagaagacaactttcctaggtctgcctgactgcacagcccaggtgccagctccgtagcatgcctcctctggttagaagtcccaggctactgcacaaataatcactgctgacggtgaggagaacctggggttgcctaggactttagcttggataaccaggctggcaatggtacccatcatgcagttcagaagaacatggtagagactgaaatttggatttttatctgtgccttgtcatctcttagaagaacatcaccagtcagtgcatagccctgtcagcactttcttcacctccttgactccaggggctatctgccctcttggtaagcttggtctattcatcctctagaggttcccatgcatgcaactcctccatcaattctttttgctttggtccttactccccaagataggctcagtccctggattatgactcttgctcccttcttcaacctccttgtttgctgcagcctgggccacccttgccatctgtacattcttgtacttaactctttctacagtgtttaaaaatggctagacacagaggtcaaggcccaagaagtttacatctctacagccaactggacttgctatctttctatctccctgtctctattaaccctacctatcctatgcccacctccatgtctacccctatcctcatgcacatttctatccttattccatttccaatttccctttctatcctctctctcaccctctctctgtctctcttccttgccctgttcctctccattccccccactcttcctctctctttatctctcatcactatctctatctcatcttgatctctatgtctctatcttatctatctatctatctatctatctatctatctatctatcatatattatctatctatccatccatcaaatatctgtctatcaatctatatttatttgtatcaatatgtatttatcatctatctatctatctacctataaatcatctttctattatctatttatctcgatatctatctgctatctatctatctatctatctatctatctatctatctatctctatgtcatctctccttttggtagtgaagattgaacccaggatcttgtactactaacctacacttctattgttataaagctgtattctaaacctccacatgatagcatttgttcacctttaggaattttacctgtttcaggaccagtagaaattctttttttttcttataaaggacaaaatttaattgggtctagcttataatttcagaggttcagtccagtatcatcaaggtgggaacatggcagcatccaggcaggcatggtgcaggaggagctgagagttctacatcttcacctgaaggctgctagcagaatactgattggcaggcagggtcttaaagcccattcccacagtgacacacctattctaacaagacaatacctccaaagagtgctactccctgggctgagcatatacaaaccatcacattccattttctggctaccacagacttgttcaaacatatgagtctatgggggccattcctaaacatagcataatgcaaaaaatacatttagttcaacttcaaaagtccccatagtctatagcagtgccaaaaatgttaaaagtccaaagttcaaagcctcttctgagattcaaccaatcacttaactgtaatccccaaaacaagacagtaaaccagctgggcaaactccaagctcagcatctctatgtctgatgtcaaagcagtgttcaaatctccagctcttttttcatctttgttgactgcaacaaactgctttctcctgggatagtttcattccctgttagcagttttcctcagcagatagaccacggctttggcatctcaaacaatgttatagcttcttgttccaatatttgggatccatatatggccttatgggttcctccatagtgctgatgtctctttgacagctttgccttctgtagcactctaagctcaggttgatccactccactgttgctgttgttcttggtgatcatcccatggtactaacatctctaatacactggggtcttccatttcaactaggtttcaccaatagcctctcataggctctcttcatagtgccaagcctcaaatcctttgcatgacctcttcagtcctgggtcatcaactgcaactgaggctgcactttcaccaatggccttccatggcctctcacagttacaagcttcagctgttcttcatgacctctccatacattcaaagccagtaccacctgggtgactcttacaaattacagctgcagcccaatgtacaactttggctacctctggaacacagcttctttgtactctcagaaaacacttcccaaaagatctcacctcagtgattctggtttcttgttaatcaccactaatttcttagctccagctaaccagcatcaattgtcccagtagttccttctattctggactctaaagccagagccacgtgcccaaagctgccaagttctgctgcttgctgggggctggaacatggcccctttgttctattacattatcatcagctttctgtttttcaagtcctttactgcctaagcttggctatcctgaaacttgcttcatagactaactttgaactcaaagatctgcatgcctgtctgctaggcactaggattgaagttgtggtccaccaagcttggatttaagtttttcttcacctagaacttgctctgttctacactggccttgaactcagagatttgcttgtctttgcctcctgggattaaagacttgtactaccaaacctggacccaaacttagctgggtaggtcacttaattactcccttaattcaatttaatgtccttgaacacaggattcagttccatttcacttcctggtgtccatttaataaactatatattttgtattttttcattcttagcttcctacgtttgttcaaaatgctcttcatgagacttcaccagagaacaaagtctatgatgggcatttctgagacttcctttgtcaatgcaattaatctgagtcttttcaccttagtttcagacagactcttcagaaaagggcaagatgtagtcacattcttcaccaaaataacacaagttcactctctaggccacatattgaaattctccactgaaacctcttgcttgggccaggcctgtacaattcaaatcactctcagaaacaaaatcttctatatccctactagaatagccctttgcgccccatttaaagcattccactgctttccaaatccaaagtcccaaaatctacatcgtttcaaacaaaagcatggtcaggcctatcacagcaataccctagtccctggtaccaacttctgtcttagggttttactgctgtgaacagacaccataaccaaggcaagtcttataaaggaagagatttttggggactggcttgcagaggttcagaggttcagtccagtatcatcaaggcaggaacatagcagtgtccaggcagacatggtacaggaaaagctgagagttctacatcttcatctgaaggctgctagcagaatactccctgtagaacttcaactagtgttattgtttcttttgagacccctaccccgacccacagacctacgctttctgaagtctcacaacacttttatttgtactatagattaaatgcttgtgctctggccaagccatgcttcaaacagaagtgtttatccaacacctgagaaacctattagtgggaggaaatgactatctttgctgtactgtatttgggcctggcttgctaccaagatccaaggaagcttcatgagtggaactggtggagatcaagtctttgaaagtctctttgaccacaaatttctcaagataccagcaatggcaggggactggagtttaaaaaacaaaacaaaacaaaacaaaacaaaacaaaacaaaacaaaaccaaaaaacaaacaaaaaaaccccatcctcctgcatacttcttccttagagttcctgactgattggaggctggttggatgactcattggtcccagcctctgacccgggccagatctgccttcagcttctggatttcttgagaagcctgcaggacgccatggaggaagtgacctcatggttgttttggccatgtgggtggtgtccatcactggtagcagctgaggtttatcagaaagtttagcctttgcactttgagaaaccaactactatctcacccgcaatttagaataataaaaagtgcatggcaaaaaccatgtgcagtaaagcagataaagaacaccggggtgggggcggggtaagggggggggagaacttgctgttcctgcctacgtggctcagggacacagacatttgcactctgcagccacactaggaaagtgttacctgcaccaactttaagagatttcgtggagttagactagaaatagcaaaaacaaaacaaaaaacattttaagctaataatttatgtttattaaataaacagacaagttagtgaaagaaaaaaaaggattagggtttgacttcaagcattttgttatacttttaaaattattggggctagaaaggtggttcagcagttaagagtgttcttacagaggaccacagtttagttccccgagcccctgtatgctcacagccacttctaagtccagctctgggtgatctgatgcttcttctagactctttgggtatatgcacacaggtgtgcatatacagatacacacacaaataaaaattaaatagaatacattataataagagtatggtatattaattgtacaaggtaatggcttcctgatgctggttgcatgcatacttcccatgtgctttggtcattctccctgtttccctttccagtctccctccctgtacttcttcctggcttctccctaaaagcccaccttttactctcttatgccctctcacatcagattgcacccaggaaagtctccatatgtgcttgtgaggctagctaattttgctttacatgatctccggttcatccagttttctgcaacagttttctgttgtccatgcacaacattttctttacccatctgtgttaatggatatctaatccaactccactcttggatatttttaattgtttattttttatagtcctcatcctcatcagacccctgactgcccacatcctttcttttctggcttgatttgtatggtgcacttttacattctctctctctctctctctctctctctctctctctctctctctctctctctctctcctcaccttcccctccctttcttcctctctctccattgctttggcatggaaaatctccaacctgttgtgggcccactgagacactattcagagtattcagagttgtgctctaattcttctgggtggaagaaactatacctgacctaccacaagccgctgacttccatgtcctcttctttgtcacgcctgcagccaccgcccctgttgtccactcccttccttcaggtttcataacaccattataaaatgtccccttttattctttgctttgagtttaatttaaactaaaatactttcaaactccttgaatggctatgataatatttctgtagaagcattctccaatgactttaacaaagaacaaatcattcagagagttgaaggaccttaaacatttggacagagtacctctgaccctgcccctaatcaggggacatataaactgtaactgtgaattcttcatctttaaacccatggtctttggggacctaagaagatttagaaagctgagttgggtcttgagggtggaaagcagctggttcatctcatcttcgttgcacttattaagctgagaggtgagatgtgagttaattccatcactggatgatggtctgtcatagagatatacttgcttctctttcagtttccaccagtgcccaagtgagtagagatggaggaagaaattcccaaacagccatagtgtgtgggcctggtcctttcaagaaggcacaaatcactgtccagtcatgtcagtgagtgactgcaccttattgagtgtcatctttccttggtgtctccagtgtagaaaaagatatgatggcagttgtgcctttgttcggaggattcctggaggaaggtgaacaagccctcaaaaaggagttagtcacaatgtgaacttacagagtgaatgaaagctgcataataatgggaagttactcatataccgtaacaggcgctcactgccagtggctgtctggctttcttctcatgcccacattacttcttgctgtaatgaggttaatgggaattaatacatatgtattagggaaaggagaggcccttggggatatgagctaactatcagcccagtacttctctctaggtagatgacagggtactggaggggagcactgagtaatggttgaaagataaattacacacaggctggtcaatatctcaccaattaggcttactctattcctaaagagtacatttctgagaaaaactctggcatctaagcagttcaaaggattacgttactgtttccttttctggggtaatttctttacccactgactttcatacaaatagacaacagaaacaaagtgttttaaaattgtgcccgtgggaatgacattcactgaatagtaaaagccagcatcctgccaggcagtgctaagaaagactatccacaacatttctgatgtacttcaccaggctgtttgttcctatccttaaagagcaaaggatttgagcagatttccttacttcttgtctttctgtcgttggtgctgtctctagtctgtgctattaattatttgtataatgcccgtgttgcaaaatatatatcatgctttatgagcactagacggtgcttctccacagcttctatcacatagctctatcaacccactgtctaaacaacctccctcattcataggcctgtgtgagtgtcctgatgaattgattttgttcaggctccatgtacctattgagtagtgttttatctctgtgtaactatacacacacactcaatactcgctggtcctaaaataaatattgtgacttcgtggacagaatggcctcacagaataactggcggcatcagatagtccttatcagtcatgcagataggagctggcttggagctggcttgtctgggtgtttggggggtgctaccccctttcctctaacccagggaagggttctgttcttcatcaaatcagaatcctgtgcagtgctcttagacagtgtccaggacaaatcttggagtgttcggtcaagtccatccgttggacttgttcaatggaagcctttcctcaatgcacttactgacctcttagcctgtgtgtgctgagctctatgggagattagacagagtaattctttaaaaaatgaaagtcagagtggctcaagattggatttcttgtttttaccagctgtattgagacataattcacatacagtcaacccatcccttcagagtgctaggaatcaaacagggctggagagatgactcagtcgtttagaacactgactgctcttccagaggtcctgagttcagttcccagcaaccacatggtggctcaccaccatctgtaatgggatctgatgccctcttctggtgtgtctgaagacagctgcagtgtactcatatagagtgcggaactgagactcaccaccccccccaagttgctgtgagaattttcatcactgatgagagaaatcttgtaccaatgagcagtcacttctcagcttcctctccgtaagcctctcagtcctgggccgtccactaatctatgtcctggcttaagcctctcagtcctgggccgtccactaatctatttcctggcttaagcctctcagtcctgggccgtccactaatctatgtcctgactctttggttttgcttcatctgccacgcttcacccaaatggaatcaacatgtgccttttttgactggcttctttcactgggcatgatgtatttgagattcatccacaatgaggcatttcatcagctaatattcattcctttttattgcctaatactactccatcatgtggatatgcctcactattcatccacccattggttgatggacattttggttgtgctcatattttgactattgtgtataatgccccagtgaacatttgtatacaaacacttagtaccaaaaatggtatgagtattttccatttctcttgggaacattttaaggagtgcagttgatgggtcacatgacaattttatatttacacttcagaagcacaattgtcctagtcagggtttctattcctgcacaaacatcatgaccatgaagcaagttggggaggaaagggtttatttagcttacatttccacattgctgttcatcactgaaagaagtcaggactggaactcaagcaggtcagagagcaggagttgatgcaaaggccatggagtgatattctttactggcttgctttccctggcttgctcagcctgctttcttatagaacccaagactgccaggccagaaatggccctacccacaaggggccttttccccttgatcactaattgagaaaatgccttacagttggatctcatggagtcatttcctcaattgaagctcctttctctgtgataactccagctgtgtcaagttgacacaaaactagccagtacacacaaccaaactactttctaaagcatggcaccattttcattacctccagcagtgtacaagtgctttaattcctcaacacatttgccagtgcttgccgccttcatttttctatgtggatgtaaaatgcatctccttgtgactgacactgttgagactattttcacaagcttatcagctgttatcttctctgaaaaaatgtctccttagacacattgctcatttaaatggcccatgtcgtattattgttatggttgttactgttattttgttattgagtcgtacaccttccccatgtactctaggtacataacgtttgatcagatatgcatctgctgtttcctctcattctctgtgttgtctttctctctccttgatggtctctactgaagtacggtcatttttaattttggtcaggtcgactttgccaggaggtcttgctttcttgtttatttttgtcacttgtactttgagtgtctaagatacaaagtctttggctaatgaggatttaaaaatttactcctatattaaagccttccattctttctaacttttcattattgaaagttaggaatataaatagaacatgaataaatataaatacaaatttctaagtattttttgagttgtctatttttccttttgtttctgtcaaattttactttatgcatttgggagcttttttactacctaattgttatatcttctgagagaattgataatttttgttgttgtttttttttgtttgtttgtttttcgagacagggtttctctgttgccctggctgttctagaattcactctgtacaccaggctggcctggaactcagaaatctgcctgcctctgcctcccaagtgcttgggattaaaggcatgcaccatgagaattgctcttttaatcacaacatttacttctttaattttggtaacaattcatatttccaagtctgttggcctgatattaatctagccattcaaactttctcaaagttgttgtttattatatatacatatatgtatatatgtaaaaagcaccctttacatattcagaattacacatttatgtgattacatattacccatatatgattacatatacaattcagattatataaaggatgctttaaaataataaaaaaggcaatcatcttcaatatacctcctgtaagcaagcaattctagttcaacaatgtaacagatatatgtgaatatgcttaaagaaacagcacatgctagaactagaatattcacagaagtagtattcataatagcctcaaggtgaaaacaacctaaatgcccattagcagaattaataaacagcttggggaatgtttaaattatagaatatttttcaaagagattaaattatatataatgtacacatgtatgaaatttcaaaacataacacttagttaaagaaaaacacagaagagctaaattaaatgtttagagctatttcgataaggtatgaaagcaggtaaatttttattgttgaaagcaagacagtggttattatacttggccatgggttgttagaggatggatattgtttctttatctggatcttggttgctcatgtgcacttacactgtgaacatcagctaaagtgtatgctctttaaatacatgcatcatatttcaattaaaactttatagaagattgtaattgtaataaaatatggaatattccacttttttcttataaaaaatgctagtttatatcaaaatcctggtgaagatagaaaaaatgcttttaacccagatcacttataactacagataaaaatcactcaatacactagaaaatgtaatctagcattatattaaaatgttgctataagaaacgtatgaatgactcaatattagaaaatattaagatatcgctattacatcaataggtcaaaagagacaaacttcattctcatcttaataagtgtcagaagacattcaacaaaatccaacatccatttctgataaaagttaaattatatacagagtactccttctgatatagttaaaaaatgatttcaaaccaaatagcttaacttacatcatacttaagagaaaaacaatagggcaatgctttccaaatgtattttatcaagaaacatgacttaaatcacaatgtactgaagaactagaggacagagctcatggtactcatatacatacagtctcatgcatatatactgtcacatacacagttacacacacagtcacacacagttacacacatacatactgtcacatacacagttaaacacacagtcacacacatacatactgtcacatacacagttacacacacagtcacacacacagttacacacacagtcacatacacagtcatacacacagtcacacaaatacatactgtcacacacagagtcacacatatacagtcacacacacaatcacgcagtcacataaacagtcacacacacagtcaagcacacacagtcatacacacagccatacacatagttacacacatacccagtcatacacacagtcacatacacagtcacacaaatacatactgtcacacacagagtcacacatatacagtcacacacacaatcacacacagtcacataaacagtcacacacacaatcaagcacacacagtcatacacacagccacacacatagttacacacatacccagtcacacatgcacaatctcacacacacacacacacacacacacacacactcactatgttaagaggaggattttcttattgattcagtttcagcagaggctcccaaatctgtgtcccagcctagacctctcaggtggccttagactgtgtagtcaagacagaccacggaactgtctaaagcccccgccagtgttgcccatcacccttcactggactgcagaacagaaagcaagtaaaccattgtacctaaagagggctgtattgactattatcttggaatagttggtggaccacatattgtttgcctccatggacttttgtcctcattttagaggagagtcttcaagtccaaaaacatcatttgaaaaggttagtgttggttctctggttaaatgagaaaggagctgatactcgattgacccctagaaaggttcaagtgagtggctgttactgattaggaatttcaggtcagcaaagccaacaatagaaattaattataaaaatacagacttaagccgggtgtggtggcacaagtctaatttaatcccagcacttgggaggagaggcaggcagatttctgagttcaaggccagcctggtctacaaagtgagttccaggacagccagggctatagagaaaccctggctcaaaaaaaccaaaaccaaccaaccaaccaaccaacaacaacaacaaaaccccagacttattggtttgcagaaggccaagaagaatgtgtgagttccctaggggcatactgtgaagcttctagagtggaccttgtggtttgaatatgaaatgtgtctccacaggctcatgtgggaaaacattgcatccccagctggggaggttctagtaacattaggtggtaggatatacttgggcatacaggctatcaggggtatgcctctgcccctagttctcctcagtctctgcttcctgccatcatgacatgaatagcttcctcccccacgttcccagtgccatgaagccctgctgacactcatggtatcaaacaaccagactcaaccctgaaaaatagtgggcaacaggaatcttttcttttttgttgttggtgaactctgtcatacatattaccctgtctcagtgatgagaaagctgactaatacagagtctcattgacaacctttggaagtcatggcagcagtcagagggaaggtgttgcccacagaaaaggagttgtaagagatcttagtaatcatgatggaggaagagacatctattcaaggtgataccttaagcaaccaagctgtagtctcccctcccccagcctgaaacctgcttgctcggggtggagcttcctgctcattcgttctgccacgcccactgctggaacctgaggagccacacacgtgcacctttctactggacccgagattattcggcgggaatcgggtcccctcccctttccttcataactagtgtcgcaacaataaaatttgagccttgatcagagtaactgtcttggctacattcttttctctcgccacctagcccctcttctcttccaggtttccaaaatgcctttccaggctagaacccaggttgtggtctgctggccggacacaacaccaagcaagagcttttgtcctttggcttcctgtatcccaccttcctgacttcctcagtcaatactcagacctcagggaggtctagaacaacagccttaaagcagatggagttgtagaggcagatgtgagaaaagacattgagtaaaaacgacttttattttacatgttatctgatataacccaagtagctaaagtgcaagaatagcatctttatatcttttttagatcacatgaatgcagtaggaaggttattaatgctgagttacatttcacaatcaacacaggagtattttatttctatatttcattttcaatttaagttaaaacatgaaattccaattttcccaggaactactagagtgaaggagttgactcatagcaggattgtcttataaattcctgtaaagttggggatgtctaatggggatagtagagactattatagcaaaggaagctttccctagagtagggctagcacctggcagcctgaaaacagagggggcgatgtgaatggtgagatagagaatattacatgtctggtaaaaatggttgatcagtagatagatagtaacacacaccaagcttctgagtaggtctgtgtacagtggaaggatatccaaaggttgaataacgttcctagtactttttatgacctaatgcttatttattcaagttgaatgtcacttccctacttttagagacaacaggatgggtctctctgatctgtatctttgaagtattctgacttggcctatttgatgatggtttgaaactcaaaatactgccacttagaagaatattatgtgatcacatgtctgtatactagtgtgagcatgttccctcaaacctcaagtgcaggcagttgtgagctgcccaatttggatgctggcagctgaactccagtctctgaaagagtgtaagttctttactgatgagccctctctctggacccaatcttcctaatgctatgaccctttgacacagttttgaatattgtggtgaccccaatcatgaaattatttcagtgcttcatcataattctaaatttgctactgttatgaattgaaatgtaaatatctgtgttttccaattgtcttatgtgatccctgtgaaaggatcactcaagccccaagggggatcacaggttgagacccctagactatccttaactgataacaggcttcattttggtcaggtaatatttattcatcccagagtatgagacaatatgctaaatgttttacatataatgtttaatttcatgcaagttctttgtagtcaagaccatcattaactcagaggaggaagcagagaaacattcaaaataacttgttcaaccaaaccagcatgcagtgtacagtctccagtaggaaaaaaccaacacaaagattgatggaatttatctagcagatagtaaaatcagtacacagaaatgtgagctctcatgagcttcaggcaacaagatgatgataaataaaacccatgtgtcaaatgtagaaaccaaagaatatttatttatttcatgacttcatgtcctcatatgtaactttctattgctgtactatcctcagtataggtactataacatggaataccacagttaatatgtagaatatgctatattcgttctggatcatattcatggaaggtgcttcctcattaatatctcagtatattgcaaacttagggtctttcctgatcttgtctaatgtgctctacctcagtgagtaaccctttcgaaggcagagattctagctgcccctgcacctccgtctgtcacaccttgaagcctgacccactgctgaggatgctttcttccctcgcatcgcctcaccaatgtccaagctgccacacagtctctccgggacaggcttttgaggcttactactgccttgtcctgtcagctcatgctacctatgactcttttccccactctatcaaaacaaactctttttaaaagtgaacattgatggctttctgcatttctaaagacccaagttcttgaaatatgctcatccctttatgattagcccttccttaccaagttcaagtttcagcacgctaattcagattctatctactgatcaaccatttttaccagacatgtaatattctctatctcaccattcacatcgccccctctgttttcaggctgccaggtgctaggcctactctagggaaagcttcctttgctataatcttgtaaagttgtgtttttctttatagttatgccacaggcaaatttcttattacttggttattttagtgtgtatatgctgcacataggtgaattactatgaggaaagatacaaaacaggtgtaaatttcccacaaaatcaccagtacctcagagaaggcacatcatagagagtattaggaaatgactaccaaaatatataccacacctaagaataaagatatgtgctcaagtgaaaaacactatgaaactttactgaaggaaataaaatactaaaagtactgatgtaataaactatgagtcatatatacatacagaactcttgaaaaatctctgatggaaataaaagaataattagacacacaggagacatgtttgtgaataggagactcaaggttgtcatgatgtaaattcttcccaactttatctgtagagtcaacatagtcataatcaaaaccctggtgagttattttgtagctattaaacatccctaactttaaaattaataatggaaagaaagaagaccagggtataacactgaaggacagaggacgaagtcagatggttgatcagacttcaggacagtataagccaagcactgtgtggtactgggaagaaatggatcagttaagcaataggaaatctaagactagataagagtcaagtgatttctgtcaaagtagcctaagccatagaaggcagaacaggtcaatctttccaagagatgattctggaacaagcaagtttcctcattcaaaacaaattaattacatggacattgtgtgtttcataaaactatgcttgaatgaatcatagactgaaatgtaaaactatgaaatgtttctcagataacacaggagaaattttagatggccctgggtttggagacggtgatgtagacatgacatcagatgcataattaaattcaaattaaaacgagaagccatggcaaaacttttaaagtggtgaaagcagcgaacataagaaaccaaatggtggcaaagatgagtcttttttttttttttttttttttagaaacatgagtcatgagtcttaattgattgttgctaagactgcaagatggcacagaaacattgtgagatgatttggaggttacttctaaaatgaactgtgtttgttgcagctatgctcctttagatagatatctaaatgccttgaaaattatgtacacacaaaacctgtatggggatatatctatcacagttcacaattgccaaaacttggaagcaactaacacaagtttcagcaagtgaaggattaccaaacaaactctgagcaatggtgtattagcacgaaaacaaaagcctgttaagacacaaaaagacatcatagaatattaatattacattactaagtgaaagaaaccaatttttaaaaagggtgcaatttgtatatatccaagtaaatgatgttttggaaaagacaacaacaaaaacagacacagtggaggatgtttaaggcagttagagaactcagcattgcagagtgttagatttggattctttttttattttaatatatttttattaggtattttcctcatttacatttccaatgctatcccaaaagtcccccataccctcacaccctacacccctacccacccactcccaacttttggccctggcgttcccctgtactggggcatataaagtttgcaagtccaatgggcctctctttccagtgatggcctactaggcaatcttttgatacatctgcagctagagtcaagagctacggggtactggttagttcagaatgttgttccacctatagggttgctgatccctttagctccttgggtactttctctagctcctccatcgggggtcctgtgatccatcaaatagctgactgtgatcatccacttctgtgtttcctaggccccggcatagtctcacaagagacagctatatctgagtcctttcagcaaaacctttctagtgtatgcaacgctcataatcagcatttggaagctgattatgagatggatccccggatatggcagtctctagatggtccatcctttcatcacagctccaaagtttgtctctgtaactccttccatgggtgttttgttcccaattctaagaaggggcaaagtggacacactttggtcttcgttcttcttgagtttcatgcatttagcaaattgtatcttatatcttgggtatcctaagtttctgggctaatatacacttatcagtgagtgcatattgtgtgagttcctttgtgattgggttacctcactcaggatgatgccctccaggtccatccatttgcctaggaatttcataaattcattctttttcatagctccattgtgtaaatttaccacattttctgcatccattcctctgttgaaaggcatctgggttctttccagcttctggctattataaagaaggctgctatgaacatagtggagcatgtgtccttcttacctgttggagcatcttctggatatatgcccaggagaggtattgcaggatcatttagtagtactatgtccaattttctgaggaaccgccagactgatttccagagtggttgtacaagcttgcaatcccaccaacaatggaggagtgttcctctttctccacatccttgccagcatctgctgtcacctgaatttttgatcttagccattctgactggtgtgagatggaatctcagggttgttttgatttgcatttccctgatgattaaggatgttgaacattttttcaggtacttctctgccattcagaattcctcaggtgagaattctttgttcagctctgagccccattttttaatggggctatttgattttctggagttcaccttctcgagttctttatatatattggatattagtcctctatctgatttacgataggtaaagatcctttcccaatctgttggtggtctttttgtcttattgatggtgtcttttgccttgcagaagctttgcaactttatgaggtcccatttatcgattcttgatcttacagcacaagccattgctgttctattcaggaattttttccctgtgccaatatctttcatgtttttccctactttctcctctataagtttcagtgtctctggttttatgtggagttccttgatccacttagatttgaccttagtacaatgagataggaaaggatcaattcacattcttctacatgataactgccagctgtgccagcaccatttgttgaaaaagctgtcttttctccactggatggttttagctcccttgtcgaagatcaagtgaccataggtgagtgggctcatctctgggtcttcaattctattccatgggtctacttgtctgtcactataccagtaccatgcagtttttatcacaattgccctgtggtacagctttaggtcaggcatggtgattccaccagaggttcttttatccttgagaagagtttttgctatcctaggttttttgttattccagatgaatctgccgattgccctttctaatttgttgaagaattgagttggaattttgatggggattgcattgaatctgtagattgcttttggcaagatagccatttttactatattgatcctgccaatccatgagcatgggagatctttccgtcttctgagatcttctttaatttctttcttcagagacttgaagttcttatcatacagatctttcacttccttagttagagtcacgccaaggtattttatattatttgtgactattgagaagggtgttttttccctaatatctttctcagcctgtttatcctttgtgtagagaaaggccattgacttgtttgagttaactttatatccagctacttcagtgaagctgtttatcaggcttaggagttctcttgtggaatttttgtggtcacttatatatactatcatatcatctgcaaatagtgacattttgacttcttcctttccaatttgtatccccttgatctctttttgttgtctaattgctctggctaggacttcaagtacaatgttgaataggtagggagagaatggacagccttatctagtccctgattttagtgggattacttccagcttctcaccatttactttgatgttggctactggtttgctgtagattgattttttcatggctaggtatgggccttgaattcctgatctttccaagacttttatcatgaatgggtgttggattttgtcaaatgctttctccgcatctaacgagatgatcatatggtttttgtctttgagtttgtttatatactggattatgttgatggatttctgtatattgaaccatccctgcatccctgggatgaaacctacttggtcaggatggatgattgttttgatgtgttcttggattcggttagctagaactttattgaggatttttccatcgatattcataagggaaattggtctgaagttctctatatttgttgggtctttttgtggtttaggtatcagagtaattgtggctttatagaatgagttgggtagagtaccttctgtttctattttgtggaatagtttgtgaaaaactgggattagatcttctttgaaggtctgatagactctgcactaaacccatctggtcctgggcttttttttggttgggagactattaatgactgcttctatttctttaggaaatataagactgcttagatcattaacctgatcttgatttaactttggttcctggtatctgtctagaaacttctccatttcatccaggttctccagttttgttgagtatagccttttgtaaaaggatttgatggtgttttggatttcttcaggatctgttgttatgtctcccgtttcatttctgattttgttcattaggatgctttccatgagccctctagtgagtctggctaagggtttatctatcttgttgattttctcaaagaaccagcttctcttttggttgattctttgaatagttcttcttgtttccacttggttgatttcacccctgaggctgattattttcagcagtctactcctcttgggtgaatttgcttctttttgttctagagcttttaggtgtgttgtcaagctgctaatgtgtgctctctctagtttctttttggaggcactcagagctatgagttttcctcttagaaatgctttcgttgtgtcccataagtttgggtatgttgtggcttaatttttattaaattccaaaaagtccttaatttctttctttattccttccttgaccaaggtatcattgagaagagtgtttttcagtttctacatgaatgttggctttctattatttattttgttattgaagatcagccttagtccatggtgatctgataggatgcatgggacaatttcaatatttttgtatatgttgaggcttgttttgtgaccaaatatgtggtcagttttggagaaggtaccatgaggtgctgagaagaaggcatatccttttgttttaggataaaatgttctgtagatatctgctagatccatttgtttcataacttctgttagtttcactgtgtccctgtttagtttctgtttccatgatctgtccattggtgaaagtggtgtgttgaagtctcccactattattgtgtgaggtgctttgagctttactaaagtttctttaatgaatgtggctgtccttctatttggagcatagatgttcagaattgatagttcctcttggaggattttacctttgatgagtatgaagtcctcctccttgtcttttttgatgactttgggttggaagtcgattttattcgatattagaatggctattccatcttgtttcttcatatcatttgcttggaaaattgttttccagcctttcattctgaggtagtgtctatctttttctctgagatgagtttcctgtaagcagcaaaatgttgggtcgtgtttgtgtagccagtctgttagtctatttcttttttattggggagttgagtccattgatattaagagatattaaggaaaagtaattgttgcttcctattatttttgttgtaaagttggcattctgttcttgtggctgtcgtcttttaggtttgttgcgggatacctttttgctttttctaggacatggtttctgtccttgtattgtttttttttttcttgttattatcctttgaagggctggattcatggaaagataatgtgtgaatttggttttgttgtggaatactttggtttctccatctatggtaattgagaatttggctgggtataatattttgggttggcgtttgtgttctcttagtgtctttataacatctgtccaggctgttctggctttcatactctggtgaaaaatctggtgtaattctgataggcttgcctttatatgttacttgcccttttacccttgctgcttttaatattctatgtttgtgtagtgcatttgttgttctgattattatgtgtcgggaggaatttcttttctggtccagtctatttggagttctgtaggcttcttatatgttcatggccatctctttctttaggtttgggaagttttcttctataattttgttgaagatatttgctggtcctttgagttgaaaatcttcattctcatctactcctattatccgtaggtttggtcttctcattgtgtcctggatttcctggatgttttgagttaggatctttttgcattttcccttttctttgattgttgtgctgatgttctctatggaatcttctgcacctgagattctcccttccatctcttgtattctgttgctggtgctcgcttctgtggttccagatttctttcctagggtttctacctccagcgttgcctcactttgggttttctttattgtgtctacttccctttttaggtcttggatggttttattcaattccatcacctgtttggttgtgttttcctgcaattctttaagggatttttgtgcttcctctttaaggtcttctacatgtttagcagagttctcctgtattcctttaagtgagttattaaagtccctcttgatgtcctcgaccatcatcatgagatatgcttttaaatccaggtctagcttttcgggtgtgttggggtgcctttgactgggcgaattgggagtgctgggttctgatgatggtgagaggtcttggtttctgttagttagattcttatgtttaccttttgccatctggtaatctctggagttacttgttatagttgtctctgtttaaagattgtttctctgttgattctgtcagcctctatcagcagacctgggagactagctctctcctttgagtttcagtggtcagagcgctctctgcaggcaagctctcctcttacagggaaggtgcacagatatctggcgttcggatctcccttctggccgaagatgaaggaccaaaacaggacctttcccagaagctgtgttgctttggcctgtcacagaagttgttagcttctgtagtccacactctagcctgtgcagactactttcggcgaagtcttggaatcaagatgtctttcacagattctgaggcaaagcccttcagggctgggcggacacctatcctctggccaggaaggtcgctggatgtctggagcccgaaaagggggctgcctcagaagctctgtggctcctgcctgtcccagaagctgttagcttctgtggtgcacactctcacttgtgcagactacttttagaggagtcctggaactaagatggctcctgtcgatgctgaggcaaagtcctcctgggccgggcagacaactgtcctttggccgggaaggtggtcggatgtctggagcctgaaaagggggctgcctcagaagctctgtggctcccatctgtcccagaagctcttagcttctgtagtgcacactctcacatgtgcagactactttcagtggagtcctggatttggattcttatgcagttatcaaactccacagaacatatagtaacaagggcaaacccataggaaactgtgcactttgtgtagtaatggtttgtcagctctggcttttgattataactagcacaccaaggaagagtgacagtggagtatgcaatgtgtgagctgaaacaagaaatatgtggaaactcggttctttctgctccattttgctcttttcctaaaattgctctgaagtaccagaaagttttttggattttgttttattttgtttttaatctgaatcttaaagtggattttatttgcttagtcctctcagtagccagtagtactcagatattttgtggtagtgaggattgaattgggagctgtacgggtctgggtcagcattttactcctgaactatgtccccagatcttcttatcagtgtgtgtgtgtgtgtgtgtgtgtgtgtgtgtgtgtgtgtgtgtgtgtgcacgtatctataataccttttgtgtataaaatggaatcaaacgggagtatgacaaaaggaattatagttagtgtaacaagactaataacagaacctcttgtgattttctcatagtatcccatgtagataaatacatgctaagctaaaaacaggcagctccagagagatatttgcatgcttgggctgctttgcattaaatctaattttaatgaaaattagagtgctttgttatttcactaaaagacagaatctttggtttcatatgttaaaagaagttgtgtcagctgctgttgaaaaatggctgaaacacattgaagatgccagtataaccacatttggataaatctgcttctgtatgactcagttttgtacagtattttgtaattctctaaggtcatttcaagaatttgtataagatagaatcactataagtgcctaaaatcactctatgccttggcatctatactagctagtttgatgtcaacttgacacaagttagagtcattatagatcaaggagcctcaattgagaaaattccttcaaaaatagggttataggcaagcctagaaaagcctgtaggcattttcttcattagtgatttaaagggacgggcccagcccattatggttctgggttctataagaaaacccagacactactgcatatgccagcaagattttgctgaaaggaccctgatataactgtctcttgttaggctatgccagtgcctggcaaatacagaagtggaatctcacagtcatcaataggatggaacacagggcccccaatgggagagctagagaaagtacccaaggagctgaaggaatctgcaaccctataggtggaacaacaatatgaactaaccagtaccaccagagcttatgtctctacctgcatatgtagcagaagatggcctagtctgccatcattgggaagagaggcccctaggtcttgcaaactttatatgccccagtacaggggaaggccagggccaagaagtgggagtgggtgggtaggggagcatggagaaggggggggagggtatagggaactttagggatagcatttgaaatgtaaataaagaaaatatctaattaaaaaaaaagaagaaaagaaaacagtctgagcaagccatgtggagcaagtcagtaagcagctctcctccatcagctcctgcctacaggttcctgtactgcctgagttcctgtcctgacttcctttaataatggggaacaatgtagaagtgtaagtcaaataaaccctttcctccacaagttgctttttgttcatggtgtttcatcacagcaataggaaccctaagataaatagaaatcctaagataatagactggcctgtatataaactctgactcttaaaaaatactggctgtgtgacagtgttaaagagtaagtgtaacttctatggcttatttgactcacaaacaccattaaattcttcacttgctgactgtgaacataaagagatcttgtgcatgaaggaaggtccatatacatagaagacaaataaacagatgacaagtagataaataggtgatagattatagatgataggtggcaggcaaataattagacaatacatacacacagagagatgataggtagatgtatgatagatgatagacatacatatatctcatatgtatatattaaaagacagacagacagataataagtactaggtagactacaagacatatagatttaaaaatactaaaaaagcaggttgaatttttttaaattgaaggaagaatttgaaaagacaatttttacactgacctaaaaaaattgtcatgaagtttactgagcactgaaaataatcataatggatggagagatggtaaaaacaaaaaacaaaaaacagaaaacaaacaaacaaacaaaataaaccacttccagaggacctaggttcaattctcagagctcatatgatggctcaaactcatttataactccaaagcctttttctggctttcacaggctgcaggcatgcatatagtacaccagtatatgtgcagacaacacactcagatgcattaaatagataaataaaaatttaataaagaattataagatatagtaataaaataatataacaaataggatttaaaacacacgtatcccaatgtatttagtgtaaagtaaagttggcatcataaatcacttgggaaagaatagtttattcaataaaatttgtgggaatgtttggctaaccatttggcaagaaagaaatttaatctcttcctcaagtcatataccagaatcaattccagatgagttggtgtataaatggaaaaaaatgaacactaaaaattctagaatgagctatgagtgagtgggacggccatcaaaggtagaaaccatgcacctaaaaaaatgatgcagcagaatgagtgcatttgaaaagagtcgaccacatgtgttctcatgtgtgcatgcatgtgcatgcacagacatacataccacacactcacacacaagcacatttacaaacacaaaattaaaggcacacatacatgcatgcacaatcacatcacacacacatacacacacaccaaacacataaacatacacacatcacacacaacacaacacacacatcacacacagcacacacacatcacacacacatatcacacacatcacacatatcacacacatacacacacatgcatgcacaatcacatcacacacacatcaaacacatacacacacacaacacacacacatcaaacacatatacatacacacatcacacacatacacacacatcaaacacatatacatacacacatcacacacatacacacacatcaaacacatacacacatcacacacaacacaacacacacacatacacacatatcaaacatacatcacacacaacacacacacatcacacacacacatacacacacacatgaaaggatgacatcaaaggaagaagccatgcacctaaaaaatgacacagcagaatgggtgcatttgcaaagagttgtacacatgtgctcccatgtgcacacacacgtgcacacatacatgataggaaaggcacacacacacacacacacacacactcccacacatgcatacacacacgcagacacaaaaggacagccatcaaagacagaagctacacacttaaaaaatgacatggcagaatggatgcattcgcagagtcacacacacatacacatgaaaagaaaagcaacatgagctgtagagagtcacacagacataccactcaaacacatgcacacacacacacacacacaccccccaaaggaaaggcaacatgggctgtgagaaacctcaaggcacttgtaaattacattctgggaaaggttcagcatcttgaatactgtatatgaaaattattatacacagtagaaaatcacttcagtattaaagtgtgaagggtgtgagcaactgacacacaagaatggtgggaagtgcgaattcaggtgtcagatctctctgggagttttactgcaaattaagataataccaagagtcagcagaagaagagacaagaaagatgtcttgatacattggtgcttttataaagaaacatttgagcatggttaaattttgaagaaaaaacaaattatttaactcatagttctggagccaaggagcaaggttaggtagtagcatcaagtgagggtctcgtccttcctcacaacatgctagatggcttcctatagcaggaacatgtgtatgcttagggtgagtatgtatgtatgtatgtatgtatgtatgtatgtatgtatgtatgtatgtatgaatgtatgagttaaggctgggcatgtgtgtgagaacacagatgtgaaagaagccaggggatgggcagggtttacatttatgaaatccacttgagggaattattcagttccttatgagtcagaactcaacccctggagaaaagcatttatcttaaaggctctgtgataaaacaccctgaaagaatagctgataggaggagggtttattttagtttacaattaaggcaattaaggtcatcgtctttcactgtgggaacattacagggacaggagcatgaaacagctggttacacacatcctcatttggaagcagatagaaatggatgtatgcatgctctcttgcttatttgtatccagctggatttttccattcatatagctcagggacccagtagggaatggtgctgcccactgcagacttctcttcccaaatcaattagtttaattaagacaacttcctataaacaaagtcacaggccagctcatgtagatggtatctcattgggactctcttccaaggtgactctaagttgtgtcaagttgacaaaactatcacaagtccttaaaggtaccaacacctctctactttgttacaattggcaccaaacctcaacgtgagttttggtggggacaaaacatattgaaaaggtagcacaagacacaggaaatgttcaatcgtacattttactgttttcctgcagtaacttacttgttatcagggctaggccaagcaaaacaaaaatcaacaacacaccataatacagttgttgtgagggagctacatagctgcagaaatataaatcaatatgaacatgtgttttcttagggaattcccatcataagatagagttttagctttcgatttcattgagatgttactaaaatatgaaaactctcctgcttcctgaagaggaggactttctgtttactctttcagtggattgtttttagtagtaatatctagaagctgcagtgaacttaaggagttaatgtcacccagaacaaaagaatgccaggggtcctttaaaagttcctctgctacagtagtgagaggacagcttcgtttgtggagccattcataacaatccagcaacttgtaaaactttctggaaggtgagaatgagctggaaaggggtaaaacatgcatggagaaaacaaatgaacttctacagtggcagctggtggagaccccatggtatgtgtcttgatggaggctccaacactctggactctctagggtatgagacgcagtcttttctcctcccatagagacctgacagctctgtgtagatatggtccagttgatttccttcccaatagaatatttttgctgcttcaccgaatcaatctcctaagttatagccacataattaacccctaggtagtcatgccaccactgccaaatgatctaagtctgaacgagagagagagaataccaggaggtcaaccttggtgccatatatcttgttttcctttttttattttttaataaaattttttgcaaatacatatttgcttatgtatgtgtttgtttgtttgttttatgtatatgaatacactgtagcttccttcagacacaccagaagagggcattggatcccattacagatggttgtgagccaccatgtggttgctgggaattgaactcaggacctttggaagagcagtcagtgctcttaaccattgagccatcgctccagtcccatatctggttttcttgagtcaggtctttgactggcctcaagcttgacaagtggaccatattgacagccagcattcttagagatctgcctgtctctgcctctccaagcctgggattcaagcatatgcgacaaagactgactttgtggttttctggggttttttgttttttgtttgtttggtttttttagtgtggattgttggagatcaaactcaggtcctcatgcttgcaaggcaaatacctcactggttgatccatcatttattaaacgtgcattcttctctcatacaatgcatccccaccacagtgtgctgtacctccactcccccaagttctcctacaccttccctctcccttagatccattgccctgtctctcctactcaaagagcagatctcccagggacatcatctaacatggctcaacaacatacaataagaccaggcacaaaccctcacatcaaggctaggctaggcaacccaggagagtaaaggggtttcaagagcagacaaaagagtcagggaaacccttacttccactatcaggagtcccacaaaaacaccaaaccaacaaccatagcatgtatactgaggatctagcatagacccatgcaggctccatgattgctgattccgtctctatgagccctatgagtctttcagagttcttctcatgacaaagggacgagaatgtattggtaagggctccaagcctgtactggcaagaagctgtgtgaaagttgtccttgacaatggggccccaaggttagtttttagagggcaacgttctgtcttagcatcagcctgggttatttagagatctctacaggacctcctgggtcaacaactcaactgaatgtaacagccccaactctggaaggctttcatggctacaaaagattgccatttcagactctgtagcctcccttactaggagtcctcctcctcatagatcccaggaagtttccaagtgcttcttaattctagctgactctacccctcgtcccttcctccccacttgtactcagtccaccctcagaatctattctatttccccttcccagagagatccatgtgtccctctagatccctccttgttttttagcctctctgagtctgttgattaatagcctgattcccatttaattaatagctaatatccacttataagtgagtacctaccatgtgtgtatttcttggtctgggttatctcactcaggatgcttttttctagttccttcaaatttcatgctgctgtttcttttaagagctgagtaatactcccttttgtaaatgtatctcatattttttatccagtctttgcttgagggacatctaggttgttgccattttctggctattatgaataaagctactatgaacatagttgatcaagtgtccttgtagtagaatggagtatccttatgggtatatgacctagagtgatatagttgggtcttgagatagattcccaattttctgaggaaccaccatcttgatttccatagtggctgtacaagcttgtactcctaccagcatgaaggagcattcccccttgcctcacatctttgacagcatgagctgtcacttgtgttttttatcttagccattctgacaggtgcaagatgaaatctcaaactagttttgatttgcatttccctgatggctaagattgttgaacatcgtttaaaaaatgcttcttcagccatttgagttttctctgttgagaatcctctgtttagatctgcaccccattttaaaattggattgtttggtttgttgatgtctagtttcttaagctctctatatagtttggatatcatttgtggagttggtgaagatcctttcccattttgtaggctgccattctgtcctatttatggtgtcctttgccttacagaagctttttagcttcataaggtcccatttgtgaattgttgacctgagtgcctgcactattggcatgcggttcaggaaccaatttcatttcttaatggcaattttttattcatagttcctaccttagcaatcaaatccatccttagaatgaggtattctctcttttattaaagatctagcttatgtggacaccaagttgtttgtatgggtatttgaaacacacactgaccttacacttagaagcgatgcttagcctgaaggcgtattaaaaatatggtaatggattggagcctctcacctttgcctccttttctgggttcataaaaaaaagctcacatggtgtggctcctctctccagatcagcatgtctccatagacaccatgagaatgacacccagccttactcatgtggctttgcatgacttgacagcattgttggagtgtccactgatatcccaaagtacagagtgcctctgtccttggcagtgctcagcccctttcatattgctgagaagtttggggagctgtgctgagccttggccatctggcactgatttactctcggcatctcaaacccttcatgattactttattgggcacagaaatggtggtgctacaatgggggtgacacatattcccaagagagtctgacaggcagcctgagactgcagtggctcccacctgtctctctcagagggacaatacaggccagagtttccttgcagggatatatcaggacaaagactggattgttcttcatatttctacgtgttcattgtgtatataccaatctgattctcaaacattttcatgtgacttaggtatgagaaagattatggcagtttctggcatcccttctgagacagtaaatgacaagtgtctatgtcaacatagtgcataataaggtcttcttgggtcacacatgactacaggatgcaaacagaaactgggctctagtgagaagtataattcagaggatggacgtggtcattgtcgacaaaatgaatagtggtctttacatgctgtctaggagggagatggggataataattgcatgagattttcctggggaaacccacaaactttctgagatggggcagacagtcatgagggctcatgtggtaacaggtcctactcagacacaactgctgcataggggccatagagaaaggcacacttctggttggcaaacctaaaaggagctctgggagaagatctgagaagaaaactgtgctcggatgagggtaacaggggagatgtgggagggtctttggacttggtatcaaggaatcttgcttgcaacactactgtgccactgactggcaatgtgtacctggtgatcctaggtcacagtctaagctccaatcacagtctaaagaaaatgttgatatcattgtcctctaggaatggtaagtgtgccatgtgacaagaaggtcttcactcaaggttgtggtcttctttcaaggttgttgaaagagctcaagaccacttgttatcaatatcactcttatctctaactagaccatggacttagtgctgtgcctgtcaagtcagtggcacaacagccctatttcagcatcttaatattgagcagagtccttttctcactttagggtcctttaccatgctagactccctacctcaatacacactttttcaaagtctgaacctggctaactcatcctgtgggtttctgctcacatactactttctcaggtttagatctggtgtcccatcaagcatttccagggcacccagctctctatttaaagcattgaacacactcttcccctagactaaaactccagcatagcagccattttctgcctctcgttcaatataatttacgtcaatagccaacacctgtgacaagcatatattaagcatgcaataaacatttgttatggattgaaccagagggagcaataatcacttgccttgagtacctgcgtatttcaggccaagtgtgtctcgggatttatcctttctcttccaaaagaaacagccactgtggtaagatatttggattaatagagccatttgatgtttgagtttgcatagcccttccgctccatctgtgctctgcaactgaagttccttctaatgtgttccagaaggccccaacttttcaaacataaaggattaagtctgatggattgtaagttactcccaagagtcagtcagaactttaggggaacttctatattaactatgttgaattcactcccggtcagtttgaaagcatatgttctacctctaaataaacaaacaaacaaataaataaataaataaaagccagcaacagatgaaacatgaggttggagtaagctaataagaagcaatgtggcaagtgtgtacaacaaagagacacagctaaggaaaaagtttcccgtttgtgaactttcaggatccactggcttccagtggataaaatgttatccatgatggcttagaagctgcagtttctgtgtgaacacacaaaacataattgaggctaacaaagtgacaagtgttgtgagtgtcacaggcttagggtgatcaactgccctgattggccagtgctgggaaatattctaagaagggagactgtgagggtctgctaaaccaggagggcgggtcactcagcaccagttgggaatccccaaccttgatactagtctttgctttgctggtgggcactcctgttcttgaatccttgttcctaatctgtgaaacaaggccaattcagggatgaaggatgctcctgttaggtctgaaatgaactacattcagtagtctacaacatgaaatgatgatataagaatattggcggtagagatagtcatcacaccagcatcccactgcaacatcaaagcctgaggcttctgggtgggaagagtcaggccttaggtgtgtgagcaggatgctcctgggatgttctcttccttctcacagccattctgcagaccctgtcctgtgcttatggctccatgtcgcgaaggagaatgggagtacctgagaagataaacgaacgctgattccctgcagaaaggacatcaacaacagaccaaataaatgattttgcccaagtctcttggtgaaccaatgcatttaattagactatttacagaaacatgggcattttacaagcaaccgggcagctgctccatcaaaggcagtatttcttccggcaacatcaacggcttttataccctctgagagggtgggtctcagcagcttcaggaatctttgcttgcctgtttatcctgaggatgggacagaacctgtggtctccagtgcagagcatgggcacagggaaattcaagaatctcagcactttcacacacatcttgaacacgttccatccaaagggcagtttctccacagtcagggccaggagcatgcgcaatcatccgggtggaaggttcccccgtgaaatcgcaggaggaaaggcacaaaggttagtcccctggcagggagaagataagctttcggctggagagggagaaaggtggagtcagccaaaggcaataaacagcttttcaggagtgctccagagcaacactggggaggagaaagaaatgagctggtgaagaatcaggaagggaaggaaacaactgccctaagaatgtctggggcactaaaactattctaaaaatgcctttggcaggagacccaaagaggccctgggtaaaaagcaggggcagtgtctgcctggcacccctctcagatgacgctaggtcaagccagcccccagacaaggtagccagacatcatggtggctggagcccaggtcttgaattggtgtggatacatcagatctacactgttacactagctctgtaacctcaggcagtttggggatcttcctgggtgtttcctccctttacaggaagctacttcccagcctccttcggattccaaaggcatggttaagcagcaacgtttaaagaccctccctcctccactgcaggccctgtgatttcctcccaataaattcatacattgaaaaatattgaaaatgaaaagggatttaaaaactcatgtgttaacaaagactggtctaacccaagcttgtttgaatcaaaactgatctgaacagattttagactatgttttaatgcttacttcacttaatttaaatattcatatattttaatgaggaaatatgaatatgtgtttgattgggggatggttttcagagaatattatagaatttatgtataggcatattgcttctctgaaaaccagaaatctctgaattacatacgtttgaaggattttagactcaggtcgtcatctcctccccttctggaagcagtgtggttctcagttggaatcttgacctcatagctcacacagagaatcagcctctgaaatcccctcccccaattctacagggtctcaatgctgccagccctgctcaaagaatagcaagaaggagactaatttattagctgttaatgctgttaggcaataatcccgagctccgagttgcacaaatccagttggaagagatgggaatgtgaagtggtcatactgacaaagtggtaaacttcagaaaatagatgggtttcatgagaagtttccagaagtcaaatcaacggtaaagttcaggggatgtttgcaaaagaaaagtgctactttcagtctaatctgaaggggaggtattttctgtggtgttaaagctagtgttttgaacatgagacaacagttacagctaggctctgcacagcccttctgtgagcaaaatctccatcaagtcacaactggaagtctgagtcaataggaatttgcaagacagggcaggtggagatggctagggagttgctagctggatactgaggcacagaggacttggtaagaataaggacacacgctccactatgttcatagcagccttatgtgtaatagccagaagctggaaacaacccagatgtccctcaacagaggatgtggtacatttacacaacggagtactactcagctattaaaaacaatgacttcatgaaattcttaggcaaatggacagaacttgaaaatatcattctgagtgaggtaacccagtcacaaaaaaacacacgtggtatgcactcagtgataagtggatattggccccaaagttcagaatacccaagatgcagttcacagaccatatgaagctcaagaaggaagactaaagtgtggatacgtcagtacttcttagaagagggaacaaaatactcacaggaggaattatggagacaaagcatggagcagagagtggaggaaagaccatccagagactgccccacctgggaatccatcccatatacagtcaccaaacccagatgctattgcgaatgccgagaagtgcttcctgtcaggagcctgatatggctgtctcctgagaggctctgccagtgcctgagaaatacagaggtggatgctcacagtcaaccattggactgagcatggggtccctgatggaggagttggagaagggactaaaggagctgtgggggtttgcagccccatgggggggggcacaacagtgtcaaccggccagaccccagagctcccagagactggaccaccaaccaaagagtacccatgaagggacccatggctctggcttcatatgtggcagaggatggccttgttggacatcaatgggaggagcaacccttgggcctgaggggcttcgatgccccagtgtaggagaatgccagaactggaaggagggagtgggtgagttggtaggggagcaacctcatagaggcagggggaggatgtattggataggggtttctggagaggagacctgaaaaggggataacatttgaaatgtacataaagaaaatattcaataataataataaacagcagatctgccccagcatgcaagtgggacttggagcggtcagatgtctatgggtgtcttacctgctctgtagtcatccctctccaagtctccaactcaaggctgccccagtctttctgctgaggtagctgtcacagcaactgagagcatgctcttggcatcagtttttgtctgagtgtgaaccccagccctctatgtccttagtcatatcactttaatgtctctaagttcagttctcccttttgtattttagcatgacagccccagccccacactcctggagtctgtcagaaagtagatgagacagatcagattgcctaactatggctccatgccttctgccctgagccatgccaagcagtccgtgtgtgtgcgtgtgtgtgtgtgtgtgtgtgtgtgtgtgtgtgtgctttttatgtcctctggctagcaactcttaacttcattattctcttgatcattctaggtcttcaacccacaaatctttccggcaataacactaccactccctcctttcccatccatagcaactcacccctacattttttattcccaacttccaatgtggtagtgtccaaggctcaactgtgtatactgctttgtcaaaatcagcaggttgggaagatggctgtagtgatgggaggagtaccctcacccagtcgacaatgcctttccaggttcagacacttcctagtcacctagaaagaatctcaagaagcagtttttttttttcaacttcaggggaaattttagaagaggaaccattgaagataaccacttaggatgcaaagactgctacctgcttttacaatacttctaattgatatctattctattgactggggtgtcagcatttctggggtgttggaattctcacttatgttcctagtgaagttacatcattaataaagaaggggagtcacaacgcacaatgcccgaggattcagaatgtggctagggacagggcccttgtgcatcttagtctttgtcctcaaaagctggtcaagacagtagaaaaattacttgaaatatgttagttcagggttgacagaggcaacacagagataaaaaggtagaagataggcatttccaggagcagaattattcttttaatcagaacaactgaagactcacagtctgaaagaatggagactggtatgaaatataacagggtgagagggaacctggaggacccatgcctaggtatgcccaagagaaattatgccatgcaacagatctgtttacagtgggtctgttgggggaaaagagaagggtgaggacttgggaaggagtagaggcagatgagtggacgtatagacagacagacagatggaggcagagccctgagggcagagaaggggctggtgcagagaaggtcagaaaggggaagagaggaaacacttggaaacagagaaagaactgtggtgattggcagcccttttataggaagccagcactctgctgtggtaggtgatgctatccccaatttcttggttccctggaaagagcctaatgaaatcacctgtaagctaacagactgcactgtggctctaggggcgggtgtgagattttatagtgcttgagagaggagacatactcagtgggcaatctttcagcttcagttcagctcctactgtgtcaggaactgtctgggctggcagttattcttgagcatgggactttcctggcaagtgtttgccatactctttaacaaggccctaatattataccctgattctaaaggtatactgaaattacttcagtaaaataaaagctagatagtaaaacaaacaataccaacaaatagagccaggcttaaaacccagacacagcagtcttgagccccaggcagcctcagctatttacagtttagtagggactcaaaaaaccaagagatatgaattagtctatggcactggtcaccatagcaaagctatgaatgtcagcctaggtgttgtgcaaactcttctgaattaaaactttccttggaggaaggctcatttagacaggaagtaaacaactcaagaccttcaggaagtccctgaaatgtacaacattcacaaggccaccctcccacaaggctctttaagcagtcataatcacaccgaggaagagagactctaggcatctgcctgcaaggtgacagagagctttagggatgcctttcagtaagcaatcgcctagactggggttcgcctctcatgagttgtccgtatttcctgtaagtatctctcatccacattcctataagtaatcaacaaactgagttggactttggtggagttgtgggattttgttgttttgtactttggggggttgtttgtttgtttgttcatctggaatgattagaggttgagtctccacaggaaaattctcccacaacaggtgcttatcaatagatgggtggataaagcaaatgttcatatgcatagtgcagtattattcagctgcaaatttgaacaaaagcatgccatttgcagaaatatgacacaactggaaatcaacatattaggtaaaatatggtagattcggagtgcaaatatcacattttctttcatgtttagaatggaggtttttattttgttttgaggtggaatctcactgtgtagccttggctgccttggaatttgctgtgtagaccaggataaccttgaactcacagagatatgcctgcttctgcctctagtgtgctaggattacaagatttgtatcactttgtctggctagcatctagatgtggaaggacatggaggcgaaagtgagaagaggcagaaaataaaagaaagcattatgtgagagagtagttccagaaaacatgcatcacacacacaaagggaaccttgtcatattagcacctagatgctatcaggtacaattacatgtgcccagcaccttgtgctgggtatagtagtgaacatcacattcccatatgcgctgctgtatttaaggtggaatctcttcaaagcttgttttaacacagttttctacaaagtatagacttgtacctgattaataagatgggatttcatggtggccagtggtggtatccctactgtatactccttatgaactccctgaaagactatctaaaagaacaagggagagtctgctcttgccaaggatatttggaaacaaccttgatactgcccctgtgcatgagcatctctgagatggggcattgctgtgttatagtatcattcaatttgacctgtaataactgtctaaatacttaaagaacataaataaagacttgatttctttaaaatatctcagtactaactgagtttatgaaagatgcaacagtctggggagatattttagagccccaaagccccagaaactttgtgtttgcagactggaggatgtaatccagctggctaatgagacatatactttgatggagaaagcctgtagatgctatgccaaccaggaagacttggatactctggtataactatggccccacaaagcccttaagagggaggacagtcacattgaatggcatcctaggacatggaaggcattcatcacacagcagtgaggtcacagaaggagcagaggtggctccacttcaagatcaaaagaagactttacttggagtatactatagtgactctccagtctacagaccaccagccatcttgctttctttcaatttgtttgttttgttggagggggcactgttgttttatgacttttgtttgtcttgttttatttgctttttaaattttggttttgtgttttctttcttcctcctttcctttcctttcctttcctttcctttcctttcctttcctttcctttcttttctttctctctttccttctttcttttgaaacagactctctagcccagtcttccatctaatatgtgtagctaaagatgaccctcaacttctgatctgcctctgcctgaatgctggggtgacaggtgtgtgctgtcacacctggtttatacagggatgagaatcaaacccaggacctcctgtgctagacaaacacactgccaacagagccacaccactcacctgttgtttcattcttgactctgatagaccttctttccccatgtgttcctggttgggagcttccatgggaacatggagtgaagtctgaggggaggccatcagagtaactaagctgtattcttctggccgactctagggaaaggctttctaaattaatttagaactattaattatgaagttattatggttgaagtttcttggcacatttatagaaataatttattcagacagagagtttctagttaacgtgggtaattggattttggaaacatatatgcttgtttaggggtaggggttgttgtagaagatatggaaatatttggaaaagaattgtgtcaaatttgtcatccaagatgaagggtgattgtacagagctgagattctcaaaatcccattaccagccttggatagatcagattctacgtacacccacacctaaacagaacaaatcccctgcatcagactgcacggaaaggaagagagcactcctcaggcctaactgggaggtacttggtggtttctttatgaatcacactctaaacgggcaagacatctttgtgtccaaatgccattaataaggttaagtgagaattattgttaacatttacacagaattacacatttactaaaagacttatagcctccttttcctaaatattcatatatttataaagcagaagttccaatcctgggatgggaggcctcagggatgatggagttctaagcaggtgatgaggatcagagctgtacttcagcttttcggtggatgggtcaatttacatggtaaattgtgaactgtagaaggtgggtacaggctcccaaagcccagagttctgaagcagcccaccatggtggtaaacatgaaacagggcaaatgtttcaactcactgtcaaaatatagaaaagagacaggaacagacaagagtcccagaattccctttaaagcacacccccccgcagtgacttggatgtttctaacattactcatcagctccaagatgggaaccaagctgttaatagcatggaccctgggagacactacagtttcaaactgtagcactcagaaacatttcagaaggtcactattcagtgtgttggtaaggcagggggagattttcttgggtgcaactccattgttagtcttagcagtagaggaaaaaagcagacaaaacccatcatccacacagccttgtgcttgaggatggtttctgccatcttagaatatagccttggccatactcttacacgtgctttgtagataactgattcagacctcagtacagcctagagtctcctgaaaggcagacctcagttggggaattgcctaggtcagattagctagtggacatgtctggaaggggttatcttgattattgactatttccttgaactcacagagttcacaggcctgcttttgcctttcaagtgctaggattaaaatgtgctatcctatctggctccttctccattgctgtgaggaattacattacacaactgtatgcatctgcaaaactcagaagtggctatgcaaattttcattagagaatgttagcgaaaaagattttgaacattcttttgtttttaagatttatttattttatgtgtatgaatacactgttgctgtcttcaggcacaccagaagagggcatcgaatcccattacagatggttgtgagccaccatgtggttgctgggaattaaactcaggacctctggaagagcactcagtgccatctctccagctccattttgaacattcttatgtattaaaatcctattctgttccccaaactagctgagaggaaaacaaaaggaagtcatttttgttttcttaatggaaattttaattatgtgagtcttgtttcttttccttttgaaagtaaagatgaatggatacattgaaatttcttccatgactgtcagttttaaaaaagttcatattccaaagttcaaataaaatccttttaaaatttattcatttattagttctctgtgcatgtgcatctttgtgggtttatgtgcaccatgaggaggtctttcaccaggcagcttccagaaaaacaccacatgtctgttctcagcaaaccatcctctcataagacagtttccagaaaaatgtcacatgacatagctgagtctccaatgaaatcagaaattcccacttcagtggtttccctagacccattgaaaaagcaaacctgaactcttccacaggcagacaccttcaccttaggattctgtatagttgaaaatggacaagcactagacagaaaggcaccattaattagagccagtaaagttaacacacagcagagaagagtcctacaatgacagcaagacatatcatgaataattatgtaactttcatttgactaaatcttcaaatatctttgggaaataagaaataacaaaaagttgcaatggttcatttgaaaaagagcaaaaagggcatctggaaatgagaaacaaaggtgaagaaagcagcaggtctccagatatatgtagcaggtcagcaggtctatgtggaaggccagcaggtctacgtggcaggctggcaggtatacctgacaagctagcaggtatccatggcaggtcagcaggtcttagtggcagaccagaccagcagaagagactagaggtgtttgagtgagtcatattggactacaatgcagaaaaactgagaaatgaagataccagagacatccatttattatgtttatttattatttagttcatgtgtgtgcgcttgtatatgtgtgcaagtgtgcaagtcccagcatacacttggggtctcttcttctaccatgaaggctttggggacagaacccaggttgccaggcttggagctagcctcttagaaaagaattccctctttgaaaattaacttgagagaagtatgccttcaccacatttcccaactttgctgatcacaaaacacttgtgaagcttaaattcattggtaggatactgataagcactcgtgagctatggcacacacctacatcacagtaatgaagacagcaaaataagtcacactgataagtaattgagcaaatgatcgaagttgacttatacatcagttttgacaggacaaaatgaaaaataaagcagtcttctgctatgaacaaactacaccaagacagtcaatgttacctttgaaaataaattgttcttcatttaaaacaaagtttaattagtctctcagacagtgggggaagaaagaatggtgttgtagactgtgaaagaatagtaagttctaaagatatatggaaagaggtttgtatcaagagatagcacacagatgttagaatatgtaaacaaacagaagaaccaagtatattttcaggtggagcgcgactatgtgagagattaacctgccaatgtcatacagacaaatacatctatgctgtagaatagaacccacaaatcaaacacaaaaaggaattcagaatgtgacaaaagacagctcacttgagaaatgctatccaatgggcaggcttttgaacgtatacttgcattcaaagctcatttgtcagtacagtgtaattcaagcgtagaagaaaagtaaactgtagaaagtaataaaagaaaacatggattatattttaagaaataaactcacagtagtaaaaactttgcattggacaacagaaaactgagcaatcatacactattataggaaatgacacccaccaaaatgttaaagtcttacacagcatcgcagtaaacaaaatgaatcagaaaaactttgcttaatgggtcaggaacctgtgtgtgtgtgtgtgtgtgtgtgtgtgtgtgtgtgtgtatgtatatatacacacacacacacatatattgcaaatgatattgaaataaaaagatgccaaaaagttccaaatcacctcacaaaaataaaattatcttctaaccacacaaaaagatgctcgaccccattcataaataaggtaatgcacatttaaactaaaaggcgaggctgttccctgactaccagaccaacagaggcagagatattagccaggacactgtgttggcagggatgggtgggagtggaatcactcacactcctgcatcttctcccatgcaggtgaatcttgtgctcgtggatccagcaatttctgggattttgtctttcagatacattggcaggtgaatgaaatgcaaggcttataacaaaatcttggaaacaaagacaatccggtcttcacgccccctgctagctgtgttctgtgtatctcatgcccacagcacagggcacactgacccatgagggtcacaagcaggtccagttttctgagttcacaggagcttaggagagtgaggaggagctacagagccaccggcagcagagaactgtcaggtcagtagtgaaatggaccctgcccctcctcctcacaaacctatagtttaattcagtaactccactcctttatgtgagtgtgttttctgtttcgaaacacacatacatacatactcactcttgcgtgactctcctgcccctgctctactcctttctccattctattcattctactcaaactgcccacgtgaaagttgctaatctgcttgtctccatctgccagattcacccaggcctcctctgccctcctctccaacctcctttttacacaggggaagctatacttttttggcagcttgttgcttaggatgctgtttctcaccatgctacaggatttccatgtcctttccagcttcgaccttcttttcttccctcttaaagcctttcctgccattcttagccactcttgtggcctcacttgtcagccaatgctgctaaagtatgcaatccatcattcgctaggaatttcgcattaataattgtttaacactggatctctccagcccatggctgacacctctacaggcaagcccttgttctctgaagtgtcctaaagtgtcccctcactgtcagctggcatcccagccctgttaccagtgcctttttaatgtgtgtgtgtgtgtgtgtgtgtgtgtgtgtgtgtgtgtgtgtatgtgtgtgtgtgtaatgttgtcccttgggcagcaaataggttccttggaagatctataaatcctattcttctaaggtctatataccagagattcatcaacactcaaaatttcatggacccaaagcaattaggacaaaggccttagaaaggggcttcttaagggatgaaatgaaatctgagaaacttccatcaggctgaggatacttgccaaggcaggctcgtccaaactcagaaaagctgccctccctaatcctgcttccaattccccaacccaccacccatattcttgacacagctaatgtcattttaaattccacatattccctgtggaagctcgagtatttagctgattcttcaacctccttctgctgagctaaccatatcaggtcttctgtctcctctctctcttgctccctctctccctctctctccccatctacttatgtgtgtctgctctggtcagcaacccaggccaccctggctgaactggggatcttcctatctttcccctggactggctctcacattctcttaccttctagctaccattcttctgcagccgcaatcctgtcaaatgcaaactcacaactgcatttgcatatttctaaagttctagttctgttcctttaacatataagaagagagccaatgagacacgccatgtgcctacacatatacacacaaatataataaatatgcaggtaatattgcatatgatgatttaataatgtgatatgaaaattcaaaccctccaccattttgggggctacttcctgtatttctgtccaatatacactagtctaataatcagaatctctgctttccttgcaatttattctgtacttttgtaaactctttgctgcttattgccaggtcttttctcaaaatttcccttcttttcacctgaatgccaatcgtatccaaaatcccaggtcaactgtccacccttcagttggggcttccttcatgtgcttcctgctagagtcactttcggtgtctatatcccacacagtagttattcataaaccagtgatcacatcacactgggcttatctgtgattgggcctggaaggcaaggagacctatcaggctaaacacaaatgttttggcaaagctttctgctaggtatcaaagtggcatcaatgcaggaagagtctccatgaagcgaaaatctcccaggatgacagacatttggaatcatcatgatgtgtgctagagagggaaaacactgacaaaccatgaaggcatcagtgagagatacctgcatccccaggcttgagacaggctcctttgagaaaagatcttaagccctaaactggaatgagttggtctggtgagagaagttttttgcatgagataaaaagagctggagatagagaccacaaataaagcaaaccaaccaatgctaagaacagtgtctgaaggcgaaggagtaggcctgaggagtctgagtggattatgttgggatagtagcttgcttatcatgaaaagggaattgtcacactgaacatctgtgtgctttctggtgtcacataaggagacaacgtggatccccatagtgacgcttttgtctgtcatgccatgtcacctggaatgttgattcaaaagtgtccctctctactaaatgagaaaaacacagtcaaaattgtgacagaagtagctggtttataaatgttctagaaataccccaacttcattctgaactctttggagaacacagcaccccacacaaagcctaacaactaagcaaggtgtgattgttcagaacatgacctcacagcctggcgccccaaacatttggttgcctgagacttgaatcaagccatgtgatttgagcactgagggaagaaatcggggatacatgctttgttctgttatggaatttccagagccggggctacattacctcagctttcccagggatcactcattcccacaccagagccctctgggtactgcaggtagccgtggaatgtgagctctatttgtcaaaacaagctagtcccatgttcaagagaccacgtggatgtggtgctttccacaagcatgagtcatggagggaggaacagagatggttatgaaaagaagggagaaacctaaaaataacagttccactgaagggtggagctagaggccaggcttgtgtcacacttggccgccatctctgcaaatatcccagctaaagcagcaagcagagtgaaggctgcagacacttaaggagcaacaagcacagcaggtgcctatggagggagggaggctgcagaatcactgaggctccttggacacaggaacaggttgttggggttgcaaggatgctggtgtggtttggctaccccttttcatcttctttctactgttccatccactccacgggggtgagggccttgtctgtccttgtcatttccgtcctcaatgtccagcattcctaaacatttgcttaaggaaaaatgggaggaatgtctgcgcccagttctctcagcttgcaagaaggcaactgagcggtgggtatggcaaccaggaagcaggaacgtgacgtcagcagcaggaacgtgacgtcagcaggacttcttgcccagtgccctcgctataccaagttattactattactcagaatggctggggctgtttgactttgggtcaataagaccaaacatgaggctactgccagtaggttggagaggattgtgtggattagaggatggacatgggtagaggtgccattgagggttgcccagcgcagcctcagggcacagaggtgcttccggtggtctgaatttgtttctagtacaacttagaggaaagtctggacctcgggctgtggcgtactcaggatctcgctttgctttggtgtgttttgttttttctttaataatcaggcaatcattgacatctgtccattggcgaggagccatgaagaagaccatccaaacagagaagagaaaagccagactggcaagtggtctggctgggaaagcaaagccagatacttcgtctccagtccccaaggatgaaaggatttaaagttcacattgggggaaggggagggggaggaagagagggattgtgaaggaatggaatggttacaaaaatgggcattttacaagccagtgtgcatttgcctcacaacgccttgttaaaactaaaagtctctgaaacaaaaggcttctgagaggtcagagacagtagtaagaacatcaaggtggggggaccactgggtgcagggaggacagccatatctggggcctcatagcccttcacaagagggaccacataagaaagcacggccctacctgcatcatgatccaggtcctgggacagacagatgtttctgtttctagctgatgggatggccaactttgagtttgactcattaaacagctttccagaactgggacttgagatcacccatctgtgggcagctcacgactctccttgggatgggattatttgttggctgggataccaggagagatagttgatgacagcctcgtgttaagtccatttggcccagcctgtgaattcaggcatagaatgaactgtatgcaaaccattggttctttggtcaagctcctgaagggaaaagtgtctggggattgacatgcacacatgtgacagccaggatgggttttggaaagtgcacaagaagctgttaggatttcagcttgagagcacaaagcttcatcaggtgggaaagctaaggcaatggtttaggttactttgtatttacagcacaagaattactggaaatatgctcttttgagtctgagttgtaaagcacacacatcaaaaccagcaaggatcccctcacaaatgtcaccaatagggctcccacacaaacatcaaacaccgaacagcactgatttacttgtttcgttgccttaaaaaaaaaacaaacaatagttgtagaataagaccatactcaaactcaagggtgtgcttcaccatgacaattgtgatggagactgggcaaagagtggagaatggagagaagaggaaaataatcaatccagatggcgacctgcacaaattagccagcccctgaatcagagatttcctttataaaccccttgatagaatccagcaggaaactgaacaagcggttctatgtccaaacttgggaacaaaaataaccactcagggcttacaggcctttagtgtgttcaaatttgcactgataaaaagttttttttgcaagatctcttgtgtgtactgagaggagtggggtaggttggaggatgattgacagggaaatgatttcaaataataatacaggagaacacagtggaggaaagtttcagctgagatccagtgactgtggaatcatggtaaaggaggatgctacatgagctggaaaagggaaactcgttcaagtagctacatacaacacatgcagcctcttaagtaggcttgtaggcatcctacatctaatgccttaagtaggctcatagccatcctacatctaatgccttaagtaggcttataggcatcctacatcctcatggatcattcaaattctcattttgaatttgtttctcttccagggtttcctagtacatccccaagagtgaaaataattttgacatttctgacataaccttgggggaacctgaagacattaaaccactcaggctaagacctcaagtttcctccgcggctgtcagacgcctgtctaaacagtctctcgctggcctacatgaattcccttgcataccacatgcgtggtctatttatatgtttccttgtcctgaacaagatttggccccattgtgtgggagcaacatggagaaagaaaaacaaagtctatccacagaaagaaaaatggagaccatgggagcttggaagaatttgcatactttgttcatggtgatgtaagagcctttgaaacacctaacccacgcattcagaaagtgttgaggctctccagctctgtcaggtgggttgccattaaaaggagaaatgtaaacactggctggcctgtccccaccctttctacttccctcaccatcccccaaagaacctagcaaattagtagagactccatttgggtggaattaagggcctgtctgttgaagggggtgggtatgatggagaggtgggagctggagagagaaaggtggtgctggggtgaggctgggtgagcagccctgggttttaaggaggcgcagggcagatccagatgacattttatggattaggtgtaatgttcagggaatttggcatttctgccacagtgcgctggctgctctgctaacatctttctctctccctgctggtaaagtgcaggagaaaagggttaaataaatgtttgtgatatgataaggtgcttgtttactcaaggaatgacagatcattggctccaaaggcagccctgaaaaatagtcggccagaactggctctcccctcgggtgatgtgatttcctcccaggattccgctctttctgaggactagcttgctctgggaattaggaaagactatttccctgcagttagcaacggacatgttggctctgagggctgcagctcccaaggctggctgggaactgggaagggctgggcctggggaagattttctggccagggacaaaccctcacagagtgccattctgagcagcagcctggggccctgctcactatcccaggaggttttatggcagggatcctctcttgttcctcatataatgagaaaagggtttactccccaagaacgatgtcatgctgctgctacactcacctctcatcacagactgcatgtcccacacctcggtgataccctgttaacactcaaacccagggcatccatgcttttcctcgaaaaccctctcagccccatgaactttctcctcttaggctctagcgatttcatagctagaagaattccttccagatccccaaacaatgagacagtcacaggcaacttatgcccctgccattgctgaaaatcaaatgtgcctggcctgggcacccaagccactcagacgctgagatcatgacaccattctgggaactatgactgtttcagaccataccctgtttccacattatactgagttggcatctgctgaagagccagcgttctaggcccagagagctttcctagcaccatgccctgcctctgctcacccttctggcatgctgtggaggctgtttgcatacttgctgagtagaagggttcacacaagatgtttggcatagttcttatttaaaagagttcactgccaaaatcaaacaccaaggggggaaacaaacaaaaacaacaacaaaaaaaaaacattgtgacagcactgctgctttcttcagtatcctgggaactactgtatgattttcacaacagccccgtggacttatcagcctgtttcccagtttgcaggacaccaggcaccagttggggaacccagtgcccttcagacacggtgactcaggttggagctgacgttatcaaagctccacattcaggctatttttatgagtgcgttcagtgctgatagggctccttgagtggacacagtcatgtgctcatgcttaactgcatgagataacactctcgtccccaagagcttacagctgacttttgcaaaaaccagatggcagaaaatggtttccctctgcccatcagcagtaactgagggggtggagatgagaagggagcagtcaagccataggtctctcagggtgggacctctgctttaacatcatcccatgcgatattttaatcatagccacattagtcgtgactccatacactgcatttctagctatgaaagttcaaattaattttaataacagtttaattaaaggcccattgggtcatcaagatgtctcctatcattcacaaacataaacactgaactgtcagtggggacatgaagaagtgttgattggacttatcagtcatatctgaatgaaatgctgtgagggtagatcttatggataatcttaaagacttgcctgactgtgtccatctgaacagtgggaaccagccttcttcacctacacacccctgtcactatcccctagggaacctcccaacaagtgattcaagtaactccctagtccatctagaaataactgttgttttcagacaatgaatatcagcttgttatgacaatatgagaattatcattttagcacaggtataaccccagggatgaggtaagtagataactgggcacatgttttgccctcatcttgcctttttcaaagctgaccctgaggctaagaactgaatggaagtagtagatatgagctgtaacgacaggtgtgccagcaggaataggcagaaagccagtatacagtgtattatgagaaggctgtcactgatagaagtgagtgatacgaaggcacacccagagctctccttccctaagagcaaggatgctaggcaccaatctgtcagctcctctttggcactggtaagttactgttgccccttccacctcgatactgccacccttgccctgtagatttccaagatggagagttacatgggcttacagtgcagccaccaatgtataatggagggaaccacggatgcataggaaggaacctggcagggtctgccatgggttttctttcttctttccttccttgtaataagaaacccctttgagagaagttagtgatgtgtgtaaatttgtctggtgagtggaatctatatggggatgtatcttaggggagaggggagggaggaaaggaggtgaggagagagagagagggatggaagaagggaaggaagacacattcctggacccaaaatgttccatggcttcctcaatattcatacctctctccccttcctagagagctcatgcttgccatccagccactcagtcttagcagtgaagataaaaaaaaaaaacaaaaaaacaaaaccctgggaaccatttgtccatttgtgtttggtccagcatttgacatggagaagatgcaagggacgtgtgtgtgtgtgtgtgtgtgtgtgtgtgtgtgtgtgtgtgtgtgtgtgtgtatctcaagatgaagttctcagctacagatggccccaatgtggtaggtaagaactcactactttaaaataattagagattcctaaatggaatgcacattcaccatgagataagtttaggaggagggtttctcaggggggtccaagcctagtcacacaattcctgcataagcctaaaggaacactagaacaaaggaacacacttcctgctggaatttacctcaggcccttcttaaaggattctactgtctcaatgagtttggattcagagctactgggagcccctgcagtgcaaagagagaggatggctgctctgaggcagagagtcagatggtagacacagcctgcttcttacaaacaaataatcaaaggataggaataaataaaatttgatttaattggttttgaggatggaagggagaatttagggggactaaatgaaaaaatgctttagagaagatttgaaatggctttgccagagcaaatactcaggatctttgaatatggtctacatggatttctgggatttctttgcctggtatgacaaaaatacagcctgaaaataggcttatacagaaacatcacatagatgtataaataatagaggctttgatcataaaaattaggtcaaaaggcagggggtagggaacctaaactatctcagacagtagaaacttagactttgatcttacaattaaaaattaatcatgtaagaacgaaacaggagatggtggagaagccctatctaaacagattataatatttgtttagattgttttttaaaatatttttattaggtattttcctcatttacatttccaatgctatcccaaaagtcccccatacactctccccccactcccctacctacccactcccactttttggccctagtgttcccctgtactgggacatataaagtttacaagtccaatgggcctctctttcaattgatggccgactaggccatcttttgatacatatgcagctagagtcaagagctctgggatactggttagttcataatgttgttctacctatagggttgcagatccctttagctccttgggtactttctctagctcctccattgggggccctgtgatccatccattagctgactgtgagcatccacttctgtgtttgctaggcctcagcatagcctcacaagagagagctatacctgggtcctttcagcaaaatcttgttagtgtatgcaatggtgtcagcatttggaagctgattatggaatggatccccagatatggcagtctctagatggtccatccttttgtctcagctccaaactttgtctctgtaactccttccatgggtgttttgttcccaattctaagaaggggcaaagagtccacactttggtcttcgttcttcttgagtttcatgcatttagcaaattgtatcttatatcttgagtatcctaactttctggtctaatatccacttatcagtgagtacatatggtatgagttcctttgtgattgggttacctcactcaggatgatgccctccaggtccatccatttgcctaggaatttcataaattcattctttttaatagctgagtagtactccattatataaatgtaccacattttctgtatccattcctctgttgaggggcatctgggttctttccagcttctggctattatgaagaaggctgctatgaacatagtggagcatgtgtccttcttaccggttgggacacttctggatatatgcccaggagaggtattgcgggatcctccggtagtactatgttcaattttctgaggaaccactagactgatttccagagtggttgtacaagctttcactcccaacaacaatggaggagtgttcctctttttccacatcctcggcagcatctgctgtcacctgaatttttgatcttatccattctgactggtgtgagatagaatctcagggttgttttgatttgcatttccctgatgattaaggatgttgaacattttttcaggtgcttctctgccattcggtattcctcaggtgagaattctttgttcagctctgaccaccatttttaatggggttatttgattttctggagtccaccttcttgagttctttatatatattggatattagtcccctatctgatttaggataggtaaagatcctttcccaatctgttgtggactttttgtcttattgacggtgtcgtttaccttgcagaagttttgcaactttatggggtcccatttatcgattttcgatattacagcacaagccattgctgtcctattcaggaatttttcccatgtacccatatcttcgaggcatttccctactttctcctctataagtttcagtgtctctggttttatgtggagttccttaatccacttagttttgaccttagtgcaaggagataggaatggatcaattcgcattcatatacacgataaccaccagttgtgccagcaccatttgttgaaaatgctgggttttttttttcccctagatggttttagctcccttgtcaaagatcaagtgaccataggtgtgtgggttcatctctgggtcttcaattctgttccattcgtctacttgtctgtcactataccagtaccatgcagtttttttcacaattgctctgtactacagctttaggtcaggcatggtgattccaccagaggttcttttatccttgagaagagtttttgctatcctaggatttttgttattccagatgaatctgccgattgccctttctaatttgttgaagaattgagttggaattttgatggggattgcattgaatctgtagattgctttggcaagatagccatttttactatattgatcctgccaatccatgagcatgggagatctttccatcttctgagatcttctttaatttctttcttcagagacttgaagttcttatcatacagatatttcacttccttagttagagtcacgccaaagtattttatattatttgtgactattgtgaagggtgtcatttccctaatttctttctcagcctgtttatcctttgtgtagagaaaggccattgatttctttaaatttcaatatttttgtatatgttgaggtttgttttgtgaccaattatgtggtcaattttggagaaggtaccatgaggtgctgagaagaaggtatatccttttttttttaggataaaatgttctgtagatatctgctagatccatttgtttcataacttctgttagtttctctgtgtccctgtttagtttgtgtttccatgatctgtccattggtgaaagtggtgtgttgaagtctcctactattattgtgtgaggtgcaatgtgttatttgagctttactaaagtttctataaagaatgtggctgcccttgtatttggagcatagatattcagaattgatagttcctcttggaggattttacctttgatgagtatgaagtgcccctccttgtcttttttgatgactttgggttggaagtctattttattagatattagaatggctactccagcttgtttcttcataccatttgcttggataattgttttccagcctttcattcttaggtagtgtctatctttttctatgagatgagtttcttttaagcagcaaaatgttgggtcctgtttgtgtagccagtctgttagtctatgtctttttattggggagttgagtccattgatattaagagatattaaggaaaagtaattgttgcttcctattatttttgttgttaaagttggcaatctgttcttgtggctgtcttcctttaggtctgttgagggattaccttcttgctttttctaggacgtggtttccatccttgtattggttttttttttctgttattatcctctgaagggctggaattgtggaaagataatgtgtgaatttggttttgtcgtggaatactttggtttctccatctctggtaattgagagtttggctaggtatagtaccctgggctggcatttgtgttttcttagtgtctgtataacatctgtccaggttctcctggctttcatagtctctggtgaaaaatctggtgtaattctgataggcttgcctttatatgttacttgacctttctcccttactgctttcattattctatctttatttagtgcatttgttgttctgattattattgtcgggaggaatttattttctggtccagtctatttggagttctgtaggcttcttgtatgttcatgggcatctctttttttaggtttgggaacttttcttctataattttgttgaagatatttgctggtcctttgtgttgaaaatcttcattctcttctactcctattattccataggtttggtcttctcattgtctcctggatttcctggatattttgggttaggatctttttgcattttccattttctttgattgttgtgtcgatgttctctatgtaatcttctgcacctgagattctctcttccatctcttgtattctgttgctgatgttggcatctatggttccagatttctttcctagggtttctatctccagcgttgcctcactttgggttttatttattgcgtctacttccctttttaggtcatggatggttttattcaattccatcacctttttggttgtgttttcctgaaaatctttaaggaatttttgtgcttcctctttaatgtcttctacctgtttagcagtgttctcctgtattcctttaagtgagttattaaagtccttcttgatgtcctctaccatcatcatgagatatgcttttaaatccgggtctagctttttgggtgtgttggggtgccctggactgggcaaagttggagtgctgggttctgatgatggtgagtggtcttggtttctgttagtaagattcttacatttaccttttgccatctggtaatctctggagttagttgttatagttgtctttgtttagagattgttcctctggtgattctgttaccttctatcagcagacctgggagactagttctctcctctgagtttcagtggtcagagcagtctctgcaggcaagctctcctcttacagggaaggtgcacagatatctggtgttcggacctccctcctggccgaagatgaaggaccaaaacaggacctttcccagaagctgtgttgctttggcctgtcatagaagctgttagcttctgtagtgcacactctcacctgtgcagactactttcagcagagtcccggaaccaagatggctcccgccgatcctgaggcaaaggcctcttgtgccgggcagacacctgtcctctggccgggaaggtggcctgatatctggagcctgaaaagggcgctgcctcagaaactctgtggctcccacctgtcccagaagctgttagcttctgtagtgcacactctcacctgttcagactactttcgttggagtcccggaaccaactgtttagattgttttaatgactttgatttgtttaattttcaaaatctgtgtggctatgagtttggtagttatattaaaattcctctaggagaggagacaagctattaaattaattccatcaatacctttaatgttttctggttactggaccaaggaatgctatttttggagagaggctctgtatttgtgctgacaggaaaggagaaaagtttttggaacccttacagagtgatattgatcagatataataggggaagaccccttgaagattttgactacagaaaacaaaattcaagaaattcaaacaagataggtctgctgattccttaacatagaaacattccagtaactggctgagacataaaaatttctccaggtgggccagcaggaacagggacataggaacccaacctgatcagtggcttgggttccttccagttggctctgatctaccttggttttgaactcaacacgcagctccccagtcccccaaaggaggtaccactttcaggcactctaacatgcccaggattgtaggatcccaggatcccaggagcttggttataccagggtcttggggtctcagaggaagcttgactgccaagaattctgacacacccaaaatctcaggatcacaggatcacaagactacagagaaagttggactatgaggagttcttattcaaccgggattacaggaaggacaggctccaatcagatacattgaggacagggagcacttgagataatcagatggcaggaggcaagcttgagaacagaagcaacagaaaccaaggttacttggcatcatcagaacacaactctcccaccatagcaaatcctggatacagtatcacaccagaaaagcaagatatggatctaaagtcacttctcatgataattatggaggactataagaaggatataaataactcacttaaagaattacaggagaaaacaggtaagcaggtagaatcccttaaagaggatacacaaaaatcccttaaggaattacaggaaaacacatccaaacaggtgaaggaatttaacaaaaccatccaggatctaaaaatggaagtagaaacaataaagaaatcacaaagggagacaactctggagatagaaaacataagaaaaggtgaaatgcaaaaatattctaacccaaaacatccaggaaatccaggacacaataagaaaaccaaacctaaggataataggtatagatgagaagtaagatttccaacctaaagagccagtaaatatcttcaacaaaattatagaagaaaacttccccaacctaaagaaagagatgcccatgaacatacaagaagcctacagaactcaaaatagtttgaaccagaaaagaaattccattcatcacattgtaatcaaaacccaaacccacaaaacaaagaaagaatattaaaagcagtaaaggaaaaaggtcaagtaacatataaaggcagacttattagaattaccccagacttctcaccagagactatgaaagccagaagattctgggcagatgttgcacaggctctaggagagcacaaatgccagcccaggttactatacacagcaaaactctcaatcaccatagaaggagaaaccaaggtatactatgacaaaaccaaatctacacagtatctttccacaaatcctgcccttcaaaggaaaataaagggaaaactcctacacaaggagggaaactatgctcttgaaaaagcaagaaagtaatctttcaacaaacctaaaagccacatgacagaattccaactctcatgacaaaaataacaggaaacacaacgacttttccttaatgtctcttactatcaatgggctcaattcccaaataaaaagacataaactaacagactggctacataaacaggacacaatgttttgctgtgtacaggaaacacacctcagggacaaagacagacacttcctcagggtaaaaggctggaaaacaattatccaagcaaatggtatgaagaaacaagctggagtagtcattctaatatcaaataaaataaactttcaacctaaagttaacaaaaaagacatggagggacacttcatactcatcaaaggaaaaatctaccaagatgaactctccattctgaacatctatgcttcaaatgcaaggacacccacattaaagaaactttactaaagcccaaagcacacattgcacctcacaaaattatagtgggagacttcaacaccccactctcatcaatggacatatcctggaaacagaaactaaacagagacacagtaaaactaacagaagttatgaaacaaatggatttaacagatatctacagaacattttatcataaacaaaaggatgtaccttcttctcaagacctcagggtagcttgtccaaaactgaccatataataggcctcagcagataaaagaggatagaaataatcccatacatcctatcagatgactacagattaatgctagtcttcaataacaacaaaaacaatagaaagcccacatacacgtggaagctgaacaacactctaatagtgataatttggtcaaggaagaaataaggaaagaaattaaagactttttagagtttaatgaaaatgaagccacaacatacccaaacttatgggatataataaaagcagtcctaatagaaaaactcatagctctgagtgccttcaaaagaaactggagaaagcacacatgaacagctttacagcataccttaaagctctagaacaaaaggaagcaaattcacccaagaggagtagacagcaggaaataatcaaacttagggctgaaatcaaccaagtggaaacaaaaagaactattcaaagaatcaaccaaactaggagctggttctttgagaaaatcaacaagactgataaacccttagccaggctaactagagggtacaggaacagtatcctaattaacaaaatgagaaatgaaaagggagacataacaacagagtctgaggaaataaaatttaaaaaatcatcagatcctactacgaaagcctatactcaacaaaactgggaaacctggatgaaatgggcaagtttctggacagatacgaggtaccaaagttatatcaggatcggattaacaatctaaacaatctcatataccctaaagaaatagaaacagtcattaatagtctcccaaacaaacaaacaaacaaacaaaaaaacccctaaggaccagatgagttttgtgcagagttccatcaaaccttcaaagaagacctagttccaatactcctcaaactattgcacaaaatagaaacagaaggtactctaccaattcattctatgaatccacaattacatcgaactaaatggagtgaaacttgaagcaatcccactaaaatcaaggactagacaaggctgcccactctctccctacctattcaatatagtacttgaagccctagctagagaaattagacaacaaaaggagataaaagagatacaaattggaaaggaagaagtcaaaatgtcactatttgcagatgatatgatagtatatataagtgaccctaaaaattccacccagagaactcctaaacctgataaaaaaattttagtgaagtaactggatataaaattaactcaaacaaatcagtgacctttctctacacaaaggataaacaggctgagaaataaattagggaaacaactcccttcacaatagtcacaaataatataaaataccttggtgtgactctaactaagaaagtgaaagatctgtatgataagaacttcaggtctctggagaaagaaatcaatgaagatctcagaaaatggaaagatctcccatgctcatggattggcaggattaatatagtaaaaatggctatattgctgaaagcaatctacagattcagtgaaatctccatcaaaattccaaatcaattcttcatagcgttaaaagggaaattttcaaattcatctggaataataaaaaacctaggatagcaaaaactcttctcaaggataaaagaacctctggtggaatcaccatccctgacctcaagctgtactacagagcaattgtgataaaaactgcctgctactggtacattgacagacaggttgatcaatggaatcgaattgaagacccagaaatgaacccacacatctatggtcacttgatctttgacaaaggagctaaaaccacccagtggaaaaaagacagcattttcaacaaatggtgctgtcccaactggcagcatgtagaagaatgcaaattgattctttcttatttcctgtacaaagctcaagtctaagtggatcaaggaactccacttaaaatcagagacactgaaacttatagaggagaaagtgaggaagagtcttgaagatatgggcacaggggaaaaaaattcctaaacagaacagcaatgacttatgctgtaagatcaagaatcgacaaatggggcctcataaaattgtaaagcttttgcaataaggacactgtcaataagacaaaacagcaaccaacagattggaaaaagatctttacaatcctaaatccaataggtggctaatatctaatatatataaagaactcaagaaattggacttcagaaaatcaaataattctattaaaaatggggtacagagctaaacaaagaattctgaactgaggaatactgaatggcagagaagctccttaaaaaatgttcaacatccttaatcatcattaaaatgcaaatcgaagcaaccctgagattttacctcacaccagtcagaatggctaagataaaaaattcaggtgacagcagatgctggaaaggatgtggagaaagaggaacactcctcccttgctggtgggatttcaagcttgtacaaccactctggaaataattttggcgtttcctcagaaaattggacatagcactaccagaagatccagcaatactactcctgggcatatacctagaagatgctccaacttgtaataaggacacatgcttcactatgttcatagcaaccttatttatattagcaagaagctggaaagaacccagatgtccctcaacagaggaatggatacagaaattgtggtacatttacacaatggagtactactcaggtattaaaaacaatttatgaaagtcttagacaaatgaatggatctggaagatatcatcttaagtgaggtaactcgatcacaaaagaacacacatgatatgtactcactgataagtggatattagcccagaagttcagaaaacccaagataaaatttgcaaaatacatgatactgaagaaggaagatcaaagtgtggatactttgatccttcttagaagggggaacaaaattcccatggaaggagttacagagacatagtttggagcagagactgaaggagtgaccatgcagagactgccccacctggcagatgtcctataaccatctgttctctttgggatcaaatgctaataatgaatctaaagttctggaatatcacaccaccacatactcactagctgtgcggttaagagcactcagctccacacaatatccagcagcctgagctcagagaagctacttcatgttcacctttccacatcattgcaatgtcagcatctttctagactacaaggggacagagaagggctaatgactatggcataggagggaatgatttctactgaaaacagcctttgccaacagaggaatctctgggtagaatgggaaatcagtaccctataatgacagagttgttgcttaaagagtacgtctgaattagtatgaaatgaaattaacacctgctaaggaggagatagccagtgggttaaagtttttgctgtacacgcatgaagacctgagttcaaatccaggcacaccagcatatgtcaacaactcctgcagtgaaatgaagaataggcagaagcttgtggatcatccagcttagcataagcagcacagcggcaaacagtgcattcttcatcaaggcagaaggtaaatattgctcttaatgccacatgtgtgtgataccatgcacatgcctacacacacacacacacacacacacacacacacacacacaccccatacaccacaaagggggaatccccaataatttatagtgtcctacagaatcacccctgtagatctgatatggactgaaagacagagttgtcactctgtagttcagggtacctgagtacactgacagagactgggtactggtcaaatgaaggatctgggatcgaagcttacacctggcattgatgactacaagaggacagccatggggtcagaaaacccttgacatggctgccacatctcaccacaaaagattctcatcacttgccagataatgcctgtccttacagcatacagcaggggcttcttaggagggatctgggaggacggacctctgatccttttacagtctactatgggagtagcatacaacaatactcatgccatatgagcaagcatgaatagtaccatggctgcctgaaacaggaaacagaatttttaaccagtgggatatgaatgaaacatacagtgggtgtgcagagaggaagtttgaaaagaggaggaagtgctcagagaggaagtttgcagagagaaagtgttcagagaggaagagtgaagagaggagaggaagaaatgtgcaaagaggaggaagtgtgcagagaggaagtgtgcagagagaaagtatgcagagaggaagagtgcagagaggaagtgtgcagaaaggagaagtgtgcagagtctttgcagagtggggatgctggaatacatggtgacatattaagtataggtgatcgaagagagacaggcagaggagggtgctggaggcacaaataaaggttgagagcacagaggaggtacagggagtagacaataatgctacactggttcctgactgcactgagattctgtgttctattccataggaaattaggaatcactaggtatatcaggagcaacatggcaagatttgaggcaatcattctccctgttatgttagaaagttctcaaattaccttccgagagatcatttttctcttatttaaactataaacctaatgcccgcacattgtagatacttttaaaagcatgtaaaaacataattagtaaggaaaaatacacacagacatacagaattgtccatttcatggctgttgctagtagagcagcaacacccctttaatactgctattaaataataacattattgattcaagcttgcagaaaattctatagtgtgagcataatcttattgtgcactctgtgcaaagtttattcttgtgttatcaaatgctgatttctctgccctctggtttcaatctaattcagtatgtaatgcttatgccaaaaatctcctgtctcaagtttgtgtaaacagttcctaccatttattctctgccttgtcaataaaagctgaccacccaatggcatgcagaagagagaatacagctgaacttccaccacccacgggagggagagagagagagagaaggcaaatagagtcactcggagaagagaagacatcataagacttcagctaaaacacagaaggccgccctaaatgcaagtattacagggatttgggctaagggggaaaccagagaagtttaaggaattaaaatagataattgactgccctggtattgagataaagcttgaaaataaatcttggtctctctgtgctgttattggggaactagctaggataaagaaaaacagccactgtattcatttgcagcgtacatttatattaaaattaccatttacaactggtgcttcacattagacaccagttataaatattacttttatacatgcatttatattaaaattaatgtttatactatagaaaacattgtcatctaaaatctaacctctcttctcatcaaaactctctgagtatctgatagtagttacgatgtgcatcttagttaggatttatattgttgtgacaaaagtttatgaccaaaaatcaggttgtggaagaaaggatttatttggattatattgctatatttctctgtttctcatcaaaggaagttaggacaggaatttaagcagggtaggaaccttgagacaagagctgatgcagagacaatggaggggtgctgcttgctggcttgctcttcatggcttgctcagtctgcttttttaacgaacccagaacccccatcccaggggtagaagcacccataatgggctgggccatcccccattaattgctaattaagaacttgcattacagacagatcttatggagattgaggattctctctgatgactctaccttacttcagattgacagtacaactaaccccttgtcaacctgacacatagacacatcatttttcaactagaacctttccttttctatttatccccacaaatggaacattaatattaatcagaatgtaaaacataaataacttttaaaagtcccacagtcctcacaaattcaaacacattaaaatatccttaacatatcatatctcttaaaaaatccaaaatcttctttaaaagttaacatcttttggcagtgggttcctgcaaaagtaagttaaatacttgctcacttcaatagggaagaaccagggaattgccacaaactgaataaagtaaaaccaagcaccaattctatctgtaaaaacttagtatccagtgtctgggatctactcatgatctttttgccttctccaatgggcttggatcacttcttcatctctgccctctgctgtgcacacagcttgtcttctaggctccaactggctccactccactgctgctgctgtccttggtggttatcccatgatattgtcatctccaaaatgctgggtcccttgatgtaactgggctgtactttcactaatagcctctccttggctctcttcatggtgccaagccttaacttctctacataaccctttcaatcctaggccctcaactgccactttatcatcattatcaatagcctctcctggcctctcacagtgactcaactgctctccatagcctcttcatgtcttcaaaaccagttccacctggtgtctttcatctatctagttcagttgccagtgtgagatacaactttggctgtctctgaaacacagacccatttgctttcagaaaatagttccccaatttcatctcaaggatgcagatctcttcttagtcaccactaatttcttaactccagtcaaccagcatcaagtatcccagcaaagcaaaggtttcattttagtagttctggtatcatgttatatcacatctgattcttcaggcatagctaaccagaccacagaatcttaattcaaaataacaaatgccccaacagtcttttaacttctaaagtagtctttaaaaccatctgcaacttcacaagccaggcatcaatcttctccactgataacaacatttgtattttccaaactcctactaaagaacactccattgaactctcaacactcaatggctcttctagcccaaagatctaaagttctttcacaatcctccccaaaatatggtcaggtctgttgcagcaatattccactcctggtaccaacttctcttagttagggttactgttgctgtggcaaaacaccatgagcaaaacttgggggagaaaggtttcagttccaattctgcataaacggtcatctttcaaaacagtgagggcaggaactcacacagggaaagaacctggaggcaggagctgttgcagaggccatggagggatactgcttatggtcttgttcctcgtggcttgttcagcctgctttcttttagaattcagggccaccagcccagggatggcaccactttcagtgggccaggccttccttcatcaaccaataattaagaaaatacactacagccagatcttatggaggcattttctcaattgaggtttctctctgatgattctagctgtgtcaaattgacataaaactagccagtcagatggtaagtagagcctgtccctaaaatgtgactctcttcaacagggccacagtagctctgctcttgccatgttaacaatctcaagaaggtgacattgtataggaaggtcagacatgatggcaattttgtgcccttcagagtagacctgtatttaagaactgtggaatctctccagtcacggagggccaagtccctctttagacccatgaactacaagaggcaacttggtgacactgccccaagctaactgcttcaattttggtaaaccataaatcattcctgcctttataagcaaaactggccaaagctgtgaggctcaacccctctgtgagactcaggccgctgtcctcatgcctctcctgtggttttcagttagaggactccaaaatgatggttacccagtgagttgtcttatgttccatgtgacaatgggaagactaccagcctcagaattgaggcagtgcttgggtatgctgcttggagagactcttcccagtctaacagcggtttattgataagggctgggttgatgcatggcttgggtagtgtcctgagtttccacacctccaggttgttgcctggaaccaagagcatggctgtgtgaacctttcatttggtacaagggagaaaatctgcactgtaagaccttacttaaccctaagtccacagcttattactaatagggttgagaacaaggcttgaaacttctttaggctgcaatttgtttgcttaaaatatagcagtttaaaccaggttcttgttaatgttccatctagaccagcattttgtaacttcttgtacacaaatgtatacccacaaacataactgtgatgtgtgctatttatggtaaatgctttggtgaaggttagaatctcttcaagttctcacgatagcaacaaggtttggccaactctaacaatctgtggctttgttcagtgtgcgctgagttatgaacattgcttagatcttgagtgagcaggcaggtcaaaggtgatcaggcaggtcaaaggtgatcaggcaggtcaaaggtgatcaggcagagagcttcattcacactccatcactgtaactgtgtggttctgaggttttttttttttttttttcctcctccttgtctggacattatgatatcactggtgtgtggtttttgttgtgataagtgacttgcacaggtgttggcacataaaaatgtttaataaatgatgtcttatatgttgtaatctctgcaggcttaataaagacatttgagtctattaatcaaatgactaatgaacaaacatggctgtcatttgttgatgggttattctataagagaatgaagtaacaagtttgtgatgttggaaaaatatattcataaactctgtgggctctcagtttcttcatgtatatggattatattcttagacctctctatgagtctataactcttgtctggctcataaactgggtctggatgtaattctaaagtaattcaaagagataaactccaaaatgaagttttaagtaataacagcatagttgtaataaatttaagtctgacaattttgaggatcatccttatttaaatgtgtaattcaagttatcttattttaataatgtgtggtaaatgcctaccttgctacattccagtgtgatggataaatttatagccatgccttaggaaaggataacaggaagagatggagacaggatgaggtggaaggccaggactagagcaaaggtgatcaggcaatgcctgcactatcttctctctgcctgggcaaagcttcacttgtatcgtgggcctttgacttcagagctggacataatattgacaattctgaaagcatcttagaagtatttgtaattgaattctgttttccatgtatcccaggcatgctctgttgaaaaactcatgtaactgacttttctgtgaaaaggaagttactctgtagttctaaatctatattagattttgttagaggaaagttcaagcctagttcttttgttggagaggaaaagtgttgtcaacccactgtgctgagatcccggtgtgggaacagtttgtctggcttcctgggctctctggggaaagtagacagagatgaagactagatatatgttccagaactggactttgaatgggcttttgtccagacttggcccaatttatcaacagagaaaaaacactgacccaggcttagtgtggactcaagcccaacttgcttcagacaggctgttttctaccaggcataccagggtcctcttcccaagatacttgctgtgcagggacaagagaggccaagagaacgggagcccagctctttctacttccactgcctagttccatcttctcttccacctctcacatttgggatcatgcagaggaaggagaggagaagactggaaaaggaaaggagaagtaatgggccacccatgaagaggcaaggcttccagatggccaggagactccaagatggagtcacttgggggaggagtaaacttggtaatacaggaaaggaaaaggaaggcatcaatggaagccccataaactgaattaaaaagatagagagatcgaagaatcccaggatggagtgtgagcaggagagaaacactatggaagttgcatccagttctgagctctttcaggtagggtctggatctcagattcaaaccttcttaatgtttcttctttacagacatccggaatcaggtacgaggattttggcatgatggaaaaaccccaggtgggccctctgaatagactgtgtccatggggcagctataacagggcggtaaagatggtggtacctgagaggattggtgaagaggaggaatcatcaaaactgttcaattctgaacccaagaggtaaatgtgaagagtttataatgaatggggaagctagggtgatggattccagagcataatgtgtcttggtaaagcacaacacagggcctcagctgattcaccatatgatcatggctgttgggagccgccctcacattcgccgttgcaagatggcgctgacatcctgtgttctaagtggtaaacaaataatctgcgcatgtgccaagggtagttctccactccatgtgctctgccttccccgtgacgacaacttggccgatgggctgcagccaatcagggagcaacacgtcctaggcggaggataattctccttaaaagggacggggtttcgccattctctctcttgctcttgctcttttgctcctaaagatgtaagcaataaagcttttgccgcagaagattccggtttgttgcgttcttcctggccagtcgcgagaacgcgtgtaagagttggtgccgaaacccgggacgagaaaacctgggatgagaaaacccgggacgagaaaacccgggacgagaaaacctgggacaggaattaccaccaccggcgcaaggaa

SEQ ID NO: 76 - DNA, 208 bp, Rattus sp.
caatacgcaagacctggtaaattcctcactcagggggacacgtactgctgtggtacgtcatctggcagcgtttggcagcgaccagcctgtgtgtgacatgtcctaggtgaggatcagtttcctatataaggggtggtctttccctcacttggggtctccgtattgtaagcttgtgttctcgctctcaagatgcattaaagctttttct

SEQ ID NO: 77 - DNA, 2527 bp, Rattus norvegicus
agacggtgcatctgttctgcttaacatcttacagacccatactgcttgtgcttaaacactaactgaactaaaccttcttccctgagacatcatggccctggccccagaattgagcagacagacaaaactgaaagaggtcgcagggatcccactgcgggattcaactgtcgacaactggagtcagattcagaccttcaaggcgaagccagatgacctcctcatctgtacttaccctaaatcagggacaacatggattcaagaaattgtcaacatgattgagcagaatggggatgtagagaagtgccagagaaccatcattcaacaccgacacccttttattgagtgggctcggccaccccagccttcaggtgtggacaaagccaatgcgatgccagctccaaggatactaaggacccatcttcccattcagctgctgccaccgtctttctggacaaacaactgtaagtacctttatgtggctcgaaacgccaaagactgcatggtttccttctaccacttctacagaatgtgccaggtgctccccaatccaggcacctggaatgagtattttgaaaccttcatcaatggaaaagtaagttgtggatcttggtttgaccatgtgaaaggatggtgggaaattcgagacagataccagattctctttctcttctatgaagacatgaagagggacccaaagcgtgaaatccagaaggtaatgcagttcatgggcaagaatttggatgaagaggtcgtggataaaatagtcctggagacatcgtttgagaaaatgaaagacaatcctttgacaaatttttctacaatccccaagactatcatggaccagtccatttcccctttcatgagaaaaggaattgtgggtgattggaaaaaccactttactgtggcccagaatgagaggtttgatgaaatctatgagcaaaagatggacggaacctctctaaacttctgcatggaactctgatcaagatgagaagatagacatcaaggacaggagtctgtctgcaagcctcaatccagccaaaggaagatcagaaagcaaactgtaaatgccaaggactgtgacaccgactctgttattactgacatcactttacaattcacaaaatcatattatgtccagtgtatactttctccactattcagtacaaatcagtaagatggcttaataagctaataaataaacaaacttgaatagtataaattttatgatgacatctttctaggaggtatagcctatattctaactctaaataactatcttatgcacaaaaacaaaatattagaaatcatctaaatgaatgtacagaaattcctaatgtctttctgctcaatcggtatttttcatggttacagtgggaagactcagtttgtagacaacttgttgcaacatgctcactggaacattttctacctggtaggaggaaattgagggaaggacttcaaggagatgtcagaaatccaaatcttaataaacagaatcctagttctggagcataaaagaaacagaagaaaggcatgagggtgacctttggaaagcacaaattgtgtcttgaaaaaagcagaatggatgcttggtgttcaacttgcagccagttgagttttgatctcctgtcatctcttctgaggaacagcttgtacttttgcccactttagcagagtccatctgcatttgcttgccagcatacttccttccacctcccactcgctccatgtcttgggcatccttttactcccagtaaccaggcaatatggagaacacagcatgttgcacgatggctcggaagacggaaaggcaaacacgtttcgggtcacaaattctcagcacttaccctttcactttagttgcagatgtcagcactgctaagctgagatcagcaggagcagcctgtggtatgagcaggatatatatgtgagttcagggtacctagcatgagctagaatgacatttgctttctatcactcaaatgtacactttctcctaaatgttgaggacgtgggcacagcatgtgttactaccagcaagagctatgagaaggtgtagtagaagttagtggatggaagctaagaaactggaacatggcctagaagaaaatgagtgctcctggccctgggtcttcccttcccttgtttcttggccatgaaaaattcaataaaatgaggtggttagttttgctttgccatttaccctcaccatgatattctgtccatctctccacagaatgtaaattccaaacccaagagctaaaataaagcttctgtctttataagttgctttccccagatattgttataatgaaagaaagctcactaatacattcccaatgatgtggttataaaatactagaaaagtctgaaattttgttgaacttatagacaatcgcttggttactgccgaaatctaaccatatgtgtatagttaattaacaatgtctattatattaaaaaattatatcctaattgtattgtaaaaaaaaaaaaaaaaaagcggccgctcgagcatgcatct

SEQ ID NO: 78 - DNA, 2443 bp, Rattus norvegicus
gatggttcttagcacagaggaaaacaggagtgttgatttagtcaacttacccagtgtcccactgcccgatggagaggctggcgtaggggagaacaacaaggattccgtgaacaacctctgcagtcagtatgaggagaaggtgcggccctgcattgacctcatcgactccctgcgagctctgggtgtggagcaagacctggccctgcctgccatcgctgtcatcggggaccagagttcagggaagagctctgtgctggaagcactgtctggagtggccctccccagaggcagtggtattgtcaccagatgtcccctggtgctgaaattgaagaagctgaatcagggagaggagtggaaaggcaaagtcacctatgatgacatcgaagtggagctctctgatccttcagaggtggaagaggccatcaacacaggtcagaaccatattgctggggtagggctggggatcagtgataaactcattagcctggatgtcagctccccacacgtcccagacctgactctgattgaccttcctggaatcaccagggtggctgtaggcaaccagccttcagacataggacggcagatcaagagacttatcactaactacatccaaaaacaagagaccatcaacctggtggtggtccccagcaatgtggacattgccaccacagaggccctgagcatggctcaggaggtggaccctgatggggataggaccatcgggatcttgaccaagcctgatctggtggacagagggactgaagacaaggtcgtggatgtggtgaggaacctcgtgtgccacctgaagaagggctacatgatagtcaagtgcaggggtcagcaggacatccaggagcagctgagcctggctgaggctcttcagaaggagcaagtcttcttcaaggaacaccctcaattcagagctcttctggaggatgggaaggccacagtgccctgcctggcagagaggctgaccatggagctcatctcacacatctgtaaatctcttcctttgttagaaaatcaaataaaggaaagtcaccagagtacaagtgaggagctgcagaagtatggtgcagacataccagaagatgagaatgaaaaaactctcttcctgattgaaaaaatcaatgcttttaaccaggacatcactgccatagtagaaggggaagagattgtgagggagaaagaatgtcgcctattcaccaagctccgtaaagagttcttcttgtggagtgaggagatcgaaaggaatttccaaaaaggttctgatgctttatataaagaagtctacacattcgaaatgcagtatcgtggccgagaactaccagggtttgtgaattacaaaacatttgagaacatcataagaagacaaatcaaaaccctggaagaaccagctatggaaatgcttcacaaggtcactgaaattgtacgggctgcctttacaacggtttctgagaaaaatttctctgagttttttaatctccacagaactaccaagtccaaacttgaagacatcagattagaacaggaaacggaagcagagaaggcgatccggcttcacttccagatggaacaaatcatctactgccaggaccaaatttataggaaagccttgcagaaggtgagagaggaggaagctgaggaggaggagaggaagcatggcaaaagcaggtccgctcagtccccaaatttacagacctcatccatggatgaaatcttccagcatctgaatgcctaccgccaggaggctcacaactgcatctccagccacattccattgatcatccagtatttcatcttgaagatgtttgctgagaagctgcagaagggcatgctccagctcctgcaggacaaggattcctgcagctggctcctgaaggaaaagagtgacaccagtgagaagaggagattcctgaaggagcggttggcaaggctggcccaagctcagcgcaggctagccaaattccctggttaagctggccctgtcctttcctgtgtctcctggataattaaatattcagggacagaagggttccagccttgttgtggtttgccctaagatatctgtattttgatgctaattccactgccccagggacagctgcctagtcctgtactcaggaatcaggtgacttcaccagaaacttctccccattgaatttgtaaaatacaggtgaggggcacatagaggatagaaagaggcctgtaattggaccagaagtaaggattggtgggagagaagtttaaaggaaggggaggatactggaagggaaagaaggagaggagagagatagagagaagccatggcaggacaatatggcaggtgacattaagattccatgctgtacctttacaggttgttacaaatgttcttaagggatggatggtactgggctttgtatgtttaggtgggcaattatatcttaccaattgggtc

SEQ ID NO: 79 - DNA, 251364 bp, Mus musculus; identical to SEQ ID NO: 58

SEQ ID NO: 80 - DNA, 90650 bp, Mus musculus
gagaggagaggagaggagaggaaaggaaaggaaaggaaaggaaaggaaaggaaaggaaaggaaaggaaaggaaaggaaaggaaaggaaaggaaaaaggaaaggaaaagattccttccagattatatcagagaagcatgatctggcaagactggtttgacttttaactcttccacatcctagaatgtaaactctccagcctggagactacagtcttatggcatattcatcatggcataggaatcatggtgccagaaatttgaggcagttggtcaaattgtgtcttcagtcaggaagtagagagcaattcgtgggtacctagtttattctgccatgttaatttacatattctggacatcttacaaaactagacagtaatatatagtcctatttgtttacattcacttagtataatatattcataattcatcctcaatatatagcatgcatcagatctgaacagtcctttgttaaagatatttttctgaatatgtatctcatagattatgaacccaccatatttattaggcattggatttgactattatgttttaaagcttatcaataatagtactatacatatttatgttcaactgtgggaattttccctctaaaatctctaagtgattgtaacacacacaaattaactgcctttgcttctagttggcagggttagttatggcaatacattatgaaccatggactagtcacaccattaaagtttcctcactaccttcagactattttattcataccactacaaatgccctcaggtccacaccaaaggcctaaggctttcatcacatcacattctttgctggtttatttcatttagagagaaaagaagtttcttagtacacttcaaaaacaataccaggcatggcactaacagaagacctgcctacttgggttttttgattctttctttgatatggacatttgagtcaggaactgaccatgtagttctcaatagttctgtctccacttcctgattgctgggataatgggtgttttccaccattcgcaaccataagaattactttataggcactgtaagttctgcctttgtgtcagcagaaggcaaggctgtaagaaattagaaatttgctctgttgctttcacagactgaggagttggtgaaacagaccctataaccagttactggctttagttaccaaatcatttgacatttcagaggtaattccattaattttctccttttggatgtcatttctaatcatttccctgaacattaccatctagtttactatacctgagaacttttcattctcattgttccttcctaatggatgacattgttcttcgggtcaccatccaacacaatttgcagcaaataaccaagtttctctacaacagtctctctctatttcccccaacatctgactcaggctagaggtcatccacttagagaacttctgaaaagtaaatcattacttagactaaagggaaccttacaaacacctcactgtctgctatgaccaatcctcaggtccttgtctgcattttcagcatctcagttaccccacaggagtattcgatgcatacctatagctagagtggaccagatcctcattataacatcttacacactctaccttgatatttttatccagaatgaaatttgtcttctacccatctctctacaaaaactgcagcgtactgaagacttttatttgttccattcatttttattttgctttaggaacatggtcatgctagaagcccaagttgacctcaaagttgacaccatcctgcatcaggctcctgagtgttgggattatctgcaatttgaagacttttaaggcaaatataacctttgacttaaagatacatctggcaatcatgtagaaatgatcacatttaacaatacctaacaatattttcaaaacaactctttatcatttgtgtataaagtccccaggaatcaggctctgaagcccaacaggaacagggctgcttaaatctttcactagttatctttagtggtcttgtgatgtcttccccttaaagtcgccttaaagatgacgagacaaaggtcatgttcttaatcaaaacacacaattacccaactctagcttcctgttccacccctttacacaaggaactggccatgacttggcagctttgattagttacttcatgttcttcaacacaagctgcagtattccttttgctgggctaagataccctgacaaaagtaacttaatagaaaaaaaaggtttgttctgacttacaatttgaagggataaattccaccgtggcatggaaggtttggtagaaggagcagagtctaccggtcacgttacattctcagtgaagaagcagagaaagaaagaattgggccaggctataaacccataaggctgtatccaactactcactccctctgatgaggctccgcctcttaaaggttccacaaactgtgcaaacagcaatagtacctggacaaaaatatccaaacacatgagctagctgcctatacgggctactgtacaatcatttgacaataatcaagagccagaattctctaggaactttctatgtatatgagcagcttcctttcccacctcatccttatgctcatctttcttcattcctttctttcttccttccttcctttccttccttcctttcttcctttcttcctttcttcctttcttcctttcttcctttcttcctttcttcctttcttccttccttcctttcttccttcctttcttcctttcttcctttcttcctttcttccttctttcctttcttcctttcttccttctttccttccttccttccttccttccttccttccttattagatattatctttatttacatttcaaattttattccctttcctagtttcccctgccaaaatcccctatcacctcccccctctctctgcgccccaacgcacccacattcctggccctggcattcctggccctggcattcccctatactgggacatagaaccttcacagcactgagggcctcacctccaatgatgtccgactaggccatcctctgctacatatgcagctacagccatgagtcccaccatctctttttttttttttaaattcgattcatggtttagactcaaggagctctggggggtactggttagtttatattgatgttcctcctataggactgcaaatcccttcagcatcttgggtactttctctaactccttcaatgctagaccttgtgctccatccaatggatttctgtaagcatccacttctgtatttgccagccactagcagagcctctcaggagacagctattttcaggttcctgtcagcaaaatcgtgttggcatctgcaatagtgtctgggtttggtggttgtttatgagatggatccccaggtggggcagtctctggatggtcatgccatcagtctctactctgaactttgcctctgtaactcctggcatggatattttgttcccccttctcgaaaagattgaactatccacactttggttttcattcttcttgagtttcatgtgttttgcaaattgtatcttggatattctgagcagaatggatacataaacaggatccagcattttgctgcatagaagaaatagtgacagagacaaacattacctcagaataaagggctggaaaaaagttttcaagcgcagggtcccaagaaacaaactggagtagccattctaatatccaataaaatagactttcaaacaaatgttatcaaaagtgatggggagggacactacatattcaccaaaggaaaaatccaccaagatgaaatctcaattctgaacacctatgccccaaatacaagggcacacaaattcataaaagaaactttactgaagctcaaaacacacattgaacctcacacataataataataatgggagtcttcaacaccccactcaccaatggacaggtcattgaaattgaaactaaacagagatacagtgaacctaacagaaattatgaaccaaatgcatttaacaaatatctacagaacatttcaccccaaaacaagagaatgtaccttcttctcagaacctcatggaaccttttccaacattgaccatataattggacacaaaacaaacctcaacagatacaagaagattgaaataataccatacattctatcagatcaccacagactaagcctagacttcaatagcaatttcttgggtacaagcaatttcttgggtacaagaaattgggtacaagattctctacagaataaacactctttgctgttgcacattatttgaatctgaggaatcattattcatgaatcacggacccactacacaatggtctcactttgaggacaccagtgctgccacagtgtcaaagttcagcttctattcatagttctttcaatcctggggtgtccatggaatttgaaaatttactcataccaatggccttttgtaaaccccaggccagctacagggtgccaggtatcaactgttctccatgaccacttcatgccttcaaacccaccactgtgtggaagatgattacatattattttccaacttttgctgccaacatagtgtgcagccttggccctcctggaccacaacttctgtgtgctgagccggaggaaatgcttttctcatttttacaccagtgatgttgatttctgaccaaaaacaactgattgtttctcagcccccactgaccagctctgacccagtaaagcacacagggtttcatttcagtggtgctggctttttatcaatcacagctgaccagaaaacacatattcttaattcaacacataacgggaaagtcctgttagagtgtggatccctgtccactcccctgctgggcatggcttcctgggaaggcaaaacacaaagagtttgactgcacttctcgcaggcaccaccgggcaggtgccaggctgtaggaaggcaccatgacgccacccaggaataggaaaacacagtctgagctgtaagaatgctggagctggtgacaatatcaggctgtggagttctcagactcttggacatcaggtgccactgggaatcttggaagagctgaaaaaggagtcagggcctggtaggctggagacatctagcccaggccagggtcgggggggaaagggagctctgacttgtcccaacagtgattgttcttagcttggtggaggcaggctgaaagctgctcagagaggccttctatgaaagaactaagctgcggctctatagtcaaatgccttctccatggctccccatggcagatcttgatgaaagacgcagtccaggattctaaaatgtttattgactattcatggtggaaaatggatgcataccctagcatactcagttctcaggttggacctgagattaaatacatttggaagggaggatggtctaggtagggaagcttattggctaagtccttcaggcctctaggtacctcattagcacagaggacactattttgggcctacatgatgatacagcacgtttctttcatgtgaggaacagggcacatgttccaggccaggagtctagcagggaatgggaagtcacctaagtccctaatgtgtgaccactaagtctccaggtctcaagcgaatttccttaccaaattccctgacatggttttagtgtccaacactacagtcttcacattctttgaaactttacaattaaggacacattgtctgtacttctcccaaaaccctttttcccccctttggtttttcgagacagggtttctctgtatagctctggctgtcctggaactcactttgtagaccaggctggccttgaatttagaaatctgcctgcctctgcctcccaagtgctgggattaaaggcgtgcaccaccacacccggcccaacacccttatttaacaagttcacaacaacggctcattaagctctcaacactaggtggcttctctggctcaaagttcccaaatcctccacaatactccaatagcatagtcaaaagttgaaaaacaccacagggtcaggtccatcacagaaagacaccattccaagaccaatttctgatctagtttacgttcttgttgtcacgataaacaccataatcaaaagaaacttggggaagtaaagcttatacttccatagtccataactgaggaaagccaagaaagaaactcaaggcagggatctagaagcagcaacctgaagcacagaccatggagcagtacttattggcttgcttcccttctggtgtatgcttaggtggctttctaatgaagaataagcccaactatgtaaaagagctgccaccaactagaggataggtggtcacatatcaattaccaatcaagatggacatggaaacaggccagttccttcattgagactctgttagatgacctcgggttatgtcaagatgaaagatgaaagcattgaggacacttgatgagttataacaaacatggactgtgaggaagctctaagaggacagcacagtgggtaaaactcttgagcctaagcatgggaaccatagtccagatcaccagcattcactcggggacaactttttattaaatcttatcagaaaggtgaggggaacattgggtacaagacattaattatcacctcgatcatcagcccagcttcagcaagagtcacatcagccagtgctagctgagctgccattgttcttgttcctgatcttgaaaacatcccttgatcaataatcaaaagtgggcttttctgaatttctatttgatttctaagatttttcaacatcagagccattaacaaaaacatcttaacctaactttactgacaatctacttctccaaattcttaagactggtggtcatttctaacaatgtacatttctaagttctttccaagggtggtgattgaatcattgatcttgaagatcaagcactgctgctgtgagtgacaatgacactgcccagtgaggggttgttaagccccctagagagttcataaaactcatagattatgagtaacacagtgagaaggcagcaagcagagcaaatctctatgacaccatgaagctctcaggacccatagttctctcggagacccacccatgagtttgtgctaaccaggagactgcgttccgtgagttctaaagctgttttgctgttcctcttgcactaccccagcacctatcaaatactacttccggatgtggcttctacatagatcgatgttcctttcccagcgccttcctgttgaccttggcattgacagttctttatatgaacgtgactgaggctctagtcttcagacaggaagaccaaataaggactgccaaggcattgagcaatatagctactgaattcaatagtgggcatgcagacttctgaaaaaaaattagcagtctgcacacttaataaatattctttagtaggatggatagttgtgtctttagctgtgaaactggatctggtctgaacttcttgattcttgcacatcagtgtcctaaatgttgaaagtacaggtgtgtaccaccatgcccagctaaagtaaagtgttttaggaaatctggtattctgaactatcagtagtcttcaggagcatcctttactccaggacaacaggagagaacgggactatccatttccagaagataatcaagcgtttggactgggggtgtctttccttcacatcattaatcactttcatgtcctcttcatccaggagccaactgagcatgtgcagcctagtgaggctgggcagtcgggacacacattgacccagagccttgacagtggtggcctgaacttgaatgcattctgggatatgtctgcagatgttcagattctgcaagtttggcaggttgtccagggcttgaaagaaatttctatatccttcctcggtaatcttgtgattcatggaaagatctaacttctcgagtttctggaaacctccactggttgccaccctggctggaaaacaaaacacaaatgaaaacagaacccagaggacatcagtaatgctcacaagttattggaactactctcaacccccaatgaaagtggggcatgctctacatgatgtttttgagatcaaactttgaacacacccctgggtgataggaaacgacccggacacacggaaacgggaagcagacaccaggaaggcaagcaccgggagctgcagctgtctgtgcagtgtggacttctcctctgtctcacaggaggacatatgccaggccagagcccaggtatggaccagggtacagtacaggagactgagaaagtgtgtcaacagtgtctccccttatgcagagaagggaaggtgacagtccttaaagctgtcctctcactggctactatagagccttccacctatagctcagaagggactccctggttactcagagcagggctctgaaggaaatggagccaggctcatggtaactttggaggtgaagatctagtagagtttttctttcattttgcattatcataccacttagcccaactatggggaaggttagggtacatttcacccagaatcctgctataccttgagtgtaaagaaagaggccctaagatagtgtttcttctgtgtcctgaataatgatcttctgtgatggtcagggggtatttctcattccctgaataaatattcttctgaaaggacgagagaacatctcagccctccccacccatggcctgctgtcctctgattttcttgcttctccacatcacattgcatcgttatctgttgctatggtgtgtttaagtgcagttgcctggctgtaaaggtgaaacattgaccaagagtaagctgtcagttgttcactgaaagaagggcattgttaccacactaagatggctcggtaggtgaggccaatgctctatggtcatgtgtgctactctgtatatagagaacaaacacaaacttgggtaaaaatagacaaacgtataggatttccccacatgaaatgtctagtggcaaaagcagctatggtgacagagagagcacagtggtcatctgtgagggtgcggagggcactactggaaaatggacacaactcaggtttggggctctgggaaagctctgtgctctagcctagttgactgatacattgacagggataagaggttgcaggaacgtgagcatgaagtggacataactctacatttccccacaatacacctgtcgtgtcagtattcagttgagtcagagtgtatctggacaggggtctgaaacaccaagtgtgaggacagagatgttactgggcagtggtgcaggggcagacactactctagtgtacgtgtgaggccctgagttcaatctcagcactggaaaaagaaaaccacagactgaatacttcttcacctctctctctctctctctctctctctctctctctctctctctctctctcacacacacacacacacacacacacacacacacacacacacacatacacacacactgatttggaaaaaaaagagtgtaaaccttcccagtcacaccaggatgactctacatctgcagaagggcaggagaggaagcaggtgatggtggaaatgaggaagcctttggaagtctttcctggctctagatgcttgcagcgggcagatccaatgacaccactgcttccacacaagggaacccctttctctgaggaaaactcaccaatttcaatcacactgtcattgtccaagatgtagtgaaagacaagaactcggagacacggaagctgcagacactgccggacaatcaatttggccacttggtgaatcccgtctccagtgggaacgagcagttcctccaggttcctgagagaacccagagcctgggctgtgggagacacaagagagccatcctcaggagctgttccattgtgagcagctaatgacttacacggtctctagtctagaaggtcctacctagcacaggccctcctcatccctgtcctctccaagagcagaaggggtcagcacagagctgctccctgctgctctctgccgctgcttcctccattctccccaaacctgtctctttactccaagctggctctccatcttcattttgccttggacacagaggcctccatggcagttcattctcctaactggccaatgctttcagcccctcccttgccatcccatcctcatctggtaccccagtgatccactctgaggagagccaccctccttggaaagcatggtccactactctgccagctttgtgccatccatccttagcatgacattctgtagatcacatgatcacagtttctacttcagtgaccttgcagaaagtgtttataagactttgtaaaattaaaacaaagttctagactcatctttgacttcccccttcccggtgttcctttaaaaagatagtatttagaactgaaattccaggatttgggagttggctcagtgataccatgcttgcctaacatgctagataccacagcaacattggggggggggggagaaccttgtgttttgccttcttgttcatctgaaagcaaagaaaactctgttgctggcagctctattgtgccagtcatgagaactcagctctgggtcttgttcttgctacatctgttcaaaacagccaatcagatgtaaaataaatttcagtatgtacagtcaccagtgcttatattagcatgcacaaggggaccattaaattgagttaactggttagcctgtttacattgccagttttgagacagtctcagcccatagtcagaatggctagaagtccatcctcctgcctcatgctcccaggatcacagacatgtgttaccactctcagcctctaggtgatctttcatgaaggagttacttctacttcaaagaaatcacaagagtcctatgtatacaacactgtttccagccttactaattaagcatgacctgagcacttgtggtcattactacaagcatgctttccagtctctcaggtgattcgctaaggaatgtaaatctgtgtgactggagatttgcatgactgtaaatgtattcagaactctctgtgtttatgagtcagagcaggtgagacagctcaggggtaaaaaagcatctgcagccatgcctgaaaacctgaattagattccaggagtcgaaatggagaagagggaactgattcccacctgttgtcctctgactgccacacacacgccacagcactgctacacacaaacacacacaatagctgtaaaaaatacacaaaaactatgaggccacatcggtaagtgcctgctgtttgagcacactgacttatctatccactacccagaaacaacacacacatatgcacacacatgcgcacgcacacacacaagtcatactctaaaggaaagacaaagaagcaagaagaaagtcgagatcttcttatgcaccgtgcactttgagaagaactgtgaagatgcagctctgctccctataccaccattgtccccctcactgtttttaccttgacagtgcttcccatgaacactcattattttcacaaacatttcttcccttgtttctttccttctttggagacagggtttcctggctaaccctggcttttcttgaacttgatctgtacactagactggtctcaaactcagagatcctattacctctgcctatggaaagcagggattaaaggtgtgcaatatcacaataggcttcataatcatttcttaactcaaaaaattttaaacatttcatacatattattttgttcaatctgagttataatggcttcttatccttaaatagaagtttgtgtgtgtgtgtgtgtgtgtgtgtgtgtgtgtgtgtgtgtgtatgcacatatatgcatatgtatcccagaagtctttgaaacaaaaagtgcatatgattttggagtggatgtggaacaaataaatgcacacagtgtcatcatgaccaaagtctactctaagaagccagtgagtctgagaaaattgcatttaatgagattaaacatgaggatgtgtaggagcagcagtgatagcatcagggaggggtttgtgggaaggtgagactgagtatcactatggagacctccaaagaatcagcctggctggtgcatgaccctctgtatggtcacattccaccaaccacaggctccatttttaaacattgcgtctgtaccaaatatgtactgacacttccgcctctttgttactcccggaacaacacagtgtaacacttgtttacatagtatttacagtatattaggcattgtctccctcactgggtcaggggcaaacttttctgtaccattttatatcataaaggatctttatggttacagcagcagcaggcccaggacctaacttccgtagatgtcaaggaacaactatacacagcttgttttgttgtaggttcagagaaggaagagaaaatatagattaaattatgaaacactgttttataaacttaccaaacttttctgatgtttccttatctgggaattgttggcttataagattcaatatcttcagagaaataaaatttggcaaaatgttgactaggaaagggggaaaaaattgagttagttcagataggtttcctataacaaagaatttcaaaaacattgaaacaatatataacattcagactgaatcactatgacacaactagaggacacaactctgcaaatgaaacatttaaaatgtagtttcttaactgtggctcattcagtgttgtgagagcctcgctgaggttcaagtgtgctcaacatcagtggcacttagttctcaagtatttaatgactctgtggacaggagaatctgaggtcaaggctgtacggttcttaccaaagggcatggcttcaaagcatcgtccagaaaactcaatctctctgagtttcttgcaggaagcaagcacagccatgagagagtcacaattcgaaaggaaatcacatttcagatggaaaacatggagatttggagagttctgaatcaatttaactggaaaaagatgaaggatttcagaaattagataagaccacaaattcctgtcaaagttgaactctcagtgtatgagctgctggcacactgattaaacaggcagtgatgcagtgtctagatgtcagactacactgggattttgctcagcttctgcaactgactagtgagcagacgacctggaacaagttcctgcccctctctggatcaggtttctgttcctgtatttcaccatcagtgtcagctctataacatttctgtgcacactgtgtaaaggtcctaaaaatcactgaatgaagtgatttttttttttactcagcagaaaaaaactagcatgctagggtcaccatcatttcagaatggccatacaaacaaaggcctttgagcccctttataactgcttaattgcttctgagataacaacagacttctaaaacctagagcatattccaaggagttataaaaaccattaactgaaggtcatcagaagatatataccacaggtgcaaagacaggacataaaatattgatttggtttatctatttaaaacttcaaggacagcttagttgtgatttttagctttccataaactgttgggagcgaccttgtttgaacattaactgccttaagtatttactggcataaagtcttggcttctgtgggaaagcactagccctgctgagtacaaatacacatagatcctgaagtcagcagagaacaaatagctataaatcttgtggataggtacctaataactcattctgttctgatcttcctgctgaactatttacccagtcaatattctgttgctgggaacagttgccttaccaaaagacaaagcgaccctacttcacccccccccatacctgctcctatgaatatataccttgtgtggggaaaaataaaaatgtgtcagctaaatcaggacctcttgacttgctgtctgtttttcacgtttcttgtcccccaatctcttccaggtgcccttcaagtccctgttcgactgtcccatgggtagaggcaaactggcgactgaacagggaccccagggggtcgcagaggagagaacgccactcatcattggagggtaggcctacctgctcatctcaggaagcatcagagagcagcttcagtttggtacgacaccacagtccaacaagcatgagacagtccaggagagagaacatagagtggtgcagatcttatgataattacggtaaggcatgggacaagaattttctaagcagtcaccttttgtgtcagggcctaaagagtccctcaaaactcgaggaactagggttaagaaaaaggatttggagagtgagtatggctgcggggttgcggctctgaaatccggcgacatcgcgcctggcacagagcggacaggctcgatggctcccgcaaagaagggtgccgagaagaagaagggccgttctgccaacaacgaggtggtgacccgagaatacactatcaacattcacaaacgcatccatggagtggacttcaagaagagtgctcctcgggcactcaaagaaattcggaagtttgccatgaaggaaatggggacaccagatgtgcgcattgacaccaggctcaataaagccgtctgggccaagggaataaggaacgttccatatcgcatccgagaacgcttgtccagaaaacgtaatgaggatgaggattccccaaacaagctctacacgctggtaacttacgtgcctgttaccacattcaaaaatctacagacggtcaatgtggatgagaactaacctgctcatgtcaaataaagtcgcagaactgccttcaaaaaaaaaaaaaaaaaaaaaaagatttgaagaaatttttagattttgtgggagagatgtgtccatggttcccccaagagggaacgactgatgtaaagaggtggcacagagttggtgcttgtttcgaagattattacgaagcctttggacctacaaaaatacctgttaaggcatttaactactggtccctcattaatgacactcttaaaaccactcctgattagccagctctccgacacttggtgtccaagggagaacagtctgttaatttgtctcctgtcctccttccgctaacctagcaactcatacactgcctctgtccttcttaagagaggaacattcacccacccccaccccccatctgtggctgatggtgtcacagaccttccccctttactgcccattaaggatctttcttcgccccacttagggaggaaattaagatggcaggcctttatccttccctcattgatcttgaaaatgaactgttgcccgctaatgaagcaactctcgcggggggaggcaactcgatatgaaccggagcactactgtgatctgccaagacagccacaatcgccctagcttcggccccccactgagaggtctactgcactcctgtctttcttcctgccaccaccctatgggactttagatgcagtttttggttcacctgccatgtccggcgcccactgtcagttaactgctgcgttgtgttcctgtgccataaggtagagacccgaaaggacaactaagtacaactgcttaggaccgaccctccagtcattagaggccgaattgcatgatctaataccttccctgcaagcgcagccttaggtctctgttaaaactaaaaaagatcagaaggaaaaaggtctaaccttccccctcttcttaaggagtggaaccacagtccctagagattccctgtccccaaaaactgacttggaggaaagccagagagcgggtgaaaaagagggagagacagatggcaggcttcagcctgactcgcaggagatcatggacgcccctgcagcacctgcggttggacctgatggtaccctgccccgctgtcgttgtcaaccgctagatttggggattctggagagacttagaattgtggtgtctggctatggcctcactgcttccttcactttggcactccttcaatcccctgtagagggatggctcacacctggggcattttgggccacactcaatggcagcaactttgtgttatggagatcggagttggcggggatggcaggggagatggagactgggagccttgtgcaactggacactgagtcatggaccacaaggagaattttgggcgagccaccttgtaacaccttggaagcccggatgcttttctcccctggcctcctggctcgggtccaccaggggtgcttggccacttagagaggactgcccctgggttggaatcctccactgcactcacggaggtgctacagggccagggcacaaacaattctttcattagccaccttacagagatggctgactgtttgtttggggtccaagagcctgaaaacccctttattaaacagcttgcttttgaaaatgccaatcctacttgccaagatattcttaaacaccaccgttttaagtcactggcagggtatgtccacctttgcgcaggcaccagaacaagccatgccatctgcttggtgactggtgctgcccttcagagggcaggcttaagtaactctcaaaagactttctttaactacaaacagcctggatatcttagttggtagagcctgagacttttaatctcagggccataggttcaaacctcacgatggtttggcagcagccccggatgtcttttgttatggatatatctcccctcaagtccaagtaaggttccttacctgctgccctaattgtcaaaggaagaaaaatgtccagacaatattttggcaaagatcctgattttagtagccagtatttagttcctccaaatgatacttggggggtttgccttgatggcctcacccactgcctttcagccagtgccttttctgcagaaaattctgatttttgcattcttgtacaattggtccctcgattgatttattatcattcagaagaattttttcacttgtgggatcagtccactgattccttcccttcactggttcaccagtgaagagagcccctaactgccatcaccatttcagtccttctaggccttggtgccacaggtgtggggactggcacctactcatatgttctctccaagtctaggcatcaagaactcagtgtcaccattgataaagatgactagcgactccaacaaggcatcaacaacctctcctccttagctgaagtcatccttcataatcgcagaggacttgatttactctttttacagcagggagggctgtgtgcagctcttaaggaagaatgctgcttttatgtagacaagacagggatggtcaaagaaagcatgagaaaagtcagagaaggactagagaaaagacacacacacagagagagagagagagagagagatgagagctggtataaaaattggttttcaacctctccgtggttgtcaaccctacttccttccattttgggactgttggttggattgtttttgcttatttcttttggtccctgggcccttaacagacttagcaacattgtgaaacatcagatagatcatttggcagcaaaacctatccaggtacattatcataaattatctatggaggaccaagagattcgagacaaggttgatattccctccagggtgtttccaaaacccatctccacataataaaggaagacttccaccccaggaccaagtagagaggggctacccagaacctcttctgactgatgaactaaattcttgcttgggttgtgaggcaaaacactgcaagggaatacaaagcaaaactaaaaatttctttctgagttccctgagggacaagcctgactgcataggggttgatgtccaaactatcccctctccaggaaaaagacatctggatggatatggccctcatgcctcactggacaacaccaggaggaccggagtcaatacaaggtcccctttagtcactggaggtcaggcctatatcgccgccaacttagcaaaggctaaaatcgccacaattcttttatacaaagtaaacagaggagatgttgggagcgaccttgtttgaacattaactgctttaagtacttgctggcataaagtcttggcctctgtgggaaagcactagcccagctgagtacaaatacacatagatcctgaagtcagtggaaaacaaatagctataaatctcgtggataggtacctaataactcattctgttctgatcttcctactgaactgtttacccagtcaatatcctgttcctgggaacaggtgtattgcccagagacgaagcaagccccctccatccccctttttgctcctatgagtatataacctgtgtgagaaaaataaaaatttgtcagcttgatcatgaccttgtcttgctgtcctgttttttatgtttcttgtcccccatttttccccaagatcccctaaagtccctgttcgactgttgtgcgggtcagggcaataaacctgtaagctagtaacaaatgatgaatgtttagccagataattactcatagggtgtgggaagccatatgtgccgttgcagagtggcactgactactgctggccaccacacataagtttggacaaacaaccaatgtgtacatatgcagtaaagttttttgcaaagacactgcctggcccaggcatgataatgaggttctgtaaggtactgagagtataatcaatcagatgtgagacatgcaaatgaggtatgataatgaggttctgtaaggtactgagagtataaccaatcagatgtgagacatgcaaatgaggtatgataatgaggttctgtaaggtactgagagtataaccaatcagatgtgagacatgcaaatgaggtatgataatgaggttctgtaaggagagagagtagccaatcagatgaggaacatgcaaataaggcttagtgcataaccaatccgggtgtgagacacgcccctcctaggcctataaaagcagcaccagttctggtctttagcctctacaatcaagctctcccaataaacgtgtgcagaaggatcctgttgcagtgtcgttcttcctggccagtggagtgcgcgcaagactagggtatatgcatgtagacattctctgttttaaacctcttattcaatttatgacctgaatttatgtgcaaactcatagtgaacttttatagcatgcaatcatgcactctgaaagtcttaactagggctggtgagatggctcagtgggtaagagcactcgactgctcttccgaaggtcaggagttcaaatcccagcaaccacatggtggctcacaaccatctgtaacaggatctgacaccctcttctggagtgtctgaagacagctacagtgtacttacatataatgaataaataaatctttttaaaaaaaagaaaagaaaagaaaagaaaagaaagtcttaactagtgctgagagcagagacaggcctccctcccccttttcttcctgagacttagaggtgatcaattccctgctaagacaaaacaaaggctactttacctagcctccctctgttttactatgaggtgctgtcttagtcagggtttctattcctgcacaaacatcatgaccaagaagcagttggggaggaaagggtttactcggcttacacttccatactgctgttcatcaccaaaggaagtcaggactggaactcaagcaggtcagaaagcaggagctgatgcagaagccatggagggatgttctttactggcttgcttcccctggcttgctcagcctgctctcttatagaccctaagaccaccagcccagagatggccccacccacaagggacctttcctccttgatcactaattgagaaaatgccttacagctggatctcatggaagcatttccccaactgaaactcctttctctgtgataaccccagcctgtgtcaagttgacacataaaaccagccagtacggtgctaaacaggagacttcagcatcttgcaccaaagcaacccagacaggcagatcaactacagaagcaaagtaccttacacttaggatgaatagatagcacatggtttatggcctagtttctgagtggaggaaaaatggaataaaaaggactcttcaactagactgacacattaggaattaggcagagtaatataaaaggaaagacaactctgagccataacttaaaaacatgtaaacatattttgactatgtttgtgatgggggggatcatccatgtgctgcagcacatatggggaggtcagggagaaattgggagaacttgctatttccttctaccatatggatctaccatatggcattggagttgctgggcttagcaagtacctttacctgctgatccatcttacctaccaacaaaatattttagtttgcttccttttgtttcttttcagacaggttctaatactatatctcagactagcctggaaataacttcatttgcagagctaggctggctttgatggatgttgtgacagtcctccatcctaagcctcccaaatttgggcattacaggcatgagtcaccatgcccctctctagtaacttttcggcatgcaaatctaccatactgttccaggtttagatttctttggtgttcattgtttttaaaaaattaaggaccccaaggtgctttccccattttgctaaatgacatgttctttgaagatagctgcaaagctctcttcaacctgagcctgggatggagagaaaaggatagaaagactgcttgcttggctattcactccaactcaaaagccatggactacctttgtaaactttgtaaaccctcaaggtagaaaaatggccaggccctgacctaaaagaaaaaaaaaatccctgagcttggcccattgatcaggccacacacaatccatccaatcccaggcctccttggaaaccttggtctcccccaccaccaagaaatgctatattaactctgtgttctgcccagttatccaatgtttctcatctgagcagaggcagccattctcctggggttttccctctcaataaaccccttgtgtgaagtgctgtgcagtgtgactttgtagtatttcttggctccagatcaccaggatggctttttttttaattaggtattttcctcgtttacattttcaatgctatcccaaaggtcccccatacccacccacccatcccctacccacccactccccctttttggccctggtgttcccctgtactggggcatataaagtttgcaagtccaatgggcctctctttgcagtaaagcagagctgtaacacttttgcctgagcagagctttctctggggaagcctcccccaaaggagcagagctgcaacacttgcattgggaaaatttccaggctgctggagcagaatttttataggggaagcctttcccttcggagctgccacacttccactgctcccagtcagattccttctccctgagcgatcagatctgtatgtgggactaaaacagcagcacaagaagagaactcctcacactgctgtggagaggaagggttaggagtggtcacctcaggctgtacagtcagatcttctgtttgaagatacactttcattgcctgatagcctgagcagtcaatgaccttagtccccccagctgacaatcagaaataattattatcccttctattacacagtgggtatgaggagagagctcatatctgtaaagtgctcacaacagttctgacatgttaaagacttgggttataaataaatctctgccttcttgatgaataagaacactgatcccaccccatcccagggacacagtttatgctgtcagacccaggaaaattttaactaatgatgatttaatggttctaacaattactggaaaggcaagtagctttaccagctgagacatgagctggagatcaagcaccatccttacctagtttggagaggtcagactccgtggaggttcgaatggataacttctccatgtgaaggaggtttgggaactctctaggaaggactgagagcacattcggtttgccatctagtctcacacacagttctttcaggcccaggaacttgtgcaagttatggaagagctgttctggaaagcagcacagagttcccatcactcaagagccccaagtgcaagttctcaaggtgcttcagccatattcatacttccaagatgaaactcctcagacatcctaacgtctgattaggaagcacatgcatgaagttactgccagctgcagcatctgctgatcatgggcagactctagggcaagccctgtgctggactctagactcacaaaataaataagacttctcaacaaccaacagcatggcaactgaaaacaactcattttgcacatctgaaaggttatagttcaactcctacctcagacttatataaaaatgtaacccaaaacctctcctgcaagcctgcacatccttttccaaggtctatcaagataagtctgccatcctcccatctactcacctatccccaggcctctagatctagccttgatcccacatccaatgcctgaacttggtctagcctcctctgcctgtttcactaccaatcactaggcttctgtcatgacccaccctgcctccaacctgcccctaactttcaggaaactcccacggcacatggaaactctctatccagccagttcttacacatgcttctccaggataatgagctggataagtttgcctgatgttccctaccttgcacccaccacaacaatccccatatacttccaactccaagcttataccagaatgcacaccaactcagcctcctatgtgcagctgagccataaccaacctctaggtctaaaacctcacaagtgtaaggctggtggaatgaaaaagaaaatccagattttgataataaattcaataaaaagagtaaaacactgagaaggactcaagtgaaatgaatatgagaatgaaaacccaacagccctactagaaaactcaaaggaaagacatacaagcaaaatgaatcaagcagaagacagaacacaggattgaaaataaagtagaggatctagatgaaagaagcaaagaagtggagttggggacatacaggaaactaggagaaggtgataaaaggagaaacagtcttccccaatgaagagcacaccaattggttagctaattgtgaccaaatggtgagccctgaaatcatacatacaagtagcaatatacagactatgcaggcactagagtagctaggaacatatacacatattcagcatgtgtatgcatacatatgtagggaggtactatcaatagtaagactatatctattcatatatatatatatatatatacatacatacatatatatatgtatatatatatatatatatatatacacaattaacttttaaaagctgccataagtttgaaagagcaaggaggggtatgtggaaaggtttacagagaagaaaagaaaggctgaaatatttatactctcaacacacaaattattttttaaaagaaaaagggtggtacagacagaacaagacatgcttcagcatatagcaggctgaaataccaaagctctgctactaacaactacaaaattttaaatcaattatttgcaatggtataagaacttagaaataaattgaatgaaagatagaaaagactgagagcaaaaaaaaaagacacctccacaactaagggcttctgttgtctggcagaggacccaataaggttcccagcacccaaactaggcacttcacaacaaccgatagccacaaccccaaaactctgacactgttctcacacctctgaggacaactgcacacacacgcacatgagcgcacacgcgcgtgcacgcacacacacacatacactgaaatgaatactttttcaaagaaatcattataaaaatgaagtctatcctagaaactacgaaagattgcttagaagacataacaattatttgcctatattaagtatcttctctggagaagccaaatacatgattctccagcatcatcttacccaaagtccagcatttagcaataagaaacaattgaaatgcccttataaggaccttgaaagatgaacttctggtggaatattgttgtagagtaattgggacctgattctatgactcagggcattctgctaccctaaagagtgaaagtgtttagatcctatcaaggagtttcactcatctaagccatgaatgagacgaagtgtcaagcagagtggctatgggaatacactcggggatacctggtaactggtttgtctctgagacctcgagagactgcagggcaggcagggtgagaagcaactcctgttctgctctgctgagctccagcctggacatggaacacttggtgacagaggccttactcagctccagagctgggcggatgctttcaaggaagccactgctgtcggataaacggaactcaatactctgtgaagctgagaagacttccatgaggacctggagcagtgcttgatctgctggacccatgttggtcactccaacttccagcctagggatcttgcatggcttgggggacagtttccaatagccagagcttattttaggtggctgtaaggggaagatgttcttaatactctttatggtctcttcattttcagataaatttttttcatgttccttcatttgttcaaaggcggatgcatagtcctgatctatagttggtggctgtaatgtttcaaaacttttttccatgactgaataatctacaacttttggcactttatttccatttatcgagacttctaaactcttcaccagtaacaggctttctgggtggtccctaaagtattgtaaattcagtactttcaaagccagtgttctccctctaaggaactgcaaaataaatggagaacattcagcaacagtgttgctttcataagcaaagtttagagcaatgcgcaataaatgttctgaaacaaatgaagagtaatattcaggagataacagccacagttccttaagtcccttcattattcgggaagttcctggagggtgatttacataatcctcatttttataggtattctccagcaactctgtctcatccaccaagtgaagcaaatgagatacaactgttggccctgcctttgatgacggatggctaaagacatacttcaaaaaattgttgtaggtggtcaaagccttcaagggtgagttaatttgtctcaaataataaagtcccagatcttggtcttcctgcctatctgaactcagaagttcagtcagtctcatggcagcaagaaactcctggaacagcggacctaaaaaccggtagactggcctcagtctctgggcggtgaatttgctcatcaagcaggtggtgagctcttcatcttcatcaactcctgcctctgccaggtcatcactattgaactcaaagcatgatgagaaaagccctgtcaaggccagctgcccacatgaggacacggtggcttggagaggcttagctgcacctttgtgctttaaggacaggtattgcatgtaggacttgaaaagtgccatatcctgaaagggctggtcagatggattttcaaaccagtcagtacatactgctgccacgaagaggggggtcttgtgaattccctgtaaatcttcattctgtccaaaataaaccataaactctagtagacgttttatattatgggagaagaacttctttaatatatagacagtattggacaagggaaactctttgatctctagactcgtatctaggtatgagcggatgcccctgaccctgtttgtatgcacagcgatcaataagcaggtccgtgacaagtagttttttgtaatcagtgtatgtagggcttgggggagtgaggccagcccactgtagtcatccaacaggaacagcacctggtgttgtaactgctggatgatgctgctcagacacacttcactaatgcagcctcctgcccctaggagttgggcacagatgatgttggccagtccctggtctggtgtgatggaactaagggagaggtagaagaccagctggaacctgtacaacaaggggcagcatcctgatgcccagagaaaagctatcctcttcaggaaggttgtctttccactgccagtttccccctccacacacatgacagagctgagattggagaagacctcagggatcgtcagggccccttgcacaggctggctgatgtgctttgaaatgatggacacatcgcagccgatcaagtggtcagtgccaaggctggagcacacttctggcaagttcatgtggcgaaaagtggctttagtgtagttgtctcttagctgctcactcagactcctggcctcttgaaaccactgggcttcactcctacccaagcctgtgcagagaaggaagatacacttcaaatctctctgatagctttgcttgtctgctaagggtatttaggactctcctccacttcacataacacctccatacacctgaggtcctcccagaccttttcatagcatcagaatgctgtccaagcctcccacttgacctgggggattaggcaggattctgaagaatactctgtcaccctagtttccttctgagctctcaggagaccagcttgctgcatggtgcctttaatgctggctggtctgggtctgacacaaggactctgttattagtcctgcattcactctcaggaagccacaggaatgctcactctctcatccacacttcccttcacctcagtgctttcctctctagcagctccctggataattataaatacactttcctttcaaatcctatggtcgaatacccagaatcccatgctgcttttcagtgcttacccaccactgtagaatgaactgctgctggatcatcgtggttgctttcacttgtggtttcctttgaaagataagtcatttattatatcaaaactggttcttgaatcaagatttgccactttattatcattgaggtccaaaaatcctctcaatgctgattgaaggaagagtactctacacattaaagagttaacttcacacataaagagtgtatacctaggtagtatatgcacagtatgtgcatcctcgctatggggagcactgtgtgagtactcacattgtaccatgtacaacaagaatggtcctcaaagagcattaagcacagcctctgtccttagtcattagttaagtctccttacatattttagtcagaccctgggatggatgcagaaggattattgcacacacacattttgagtaagagagtttcatgtagtgtaggctggtctggaattcctgtgtatcgaaggataacacttcgtcctcctttctccacttcccaagtgaaaggagcctccacacacccctgacttcaaaatcatcctttttttctattctgggactctaaaagtctttccacacatagtttgttcagagctgaagacctctttgtgtctattagggggatgtctagtagctgaacctcaatccttccacttacatcatacacaagaccttgggtttgatctcctcgattacagtaaagaacaaaaatctaataggaacatactcataattctggcatttggtagcaggaggattacagattcccagacagtctgcaatttgaaaatagcaagttcaaagtcagcctgagctgtacagtgagaacctgtcccaaacaaaatttcaaccaaacaaaatgaaacctgccttgcacatctcaaaagaagtaagaagtcaagcccactgccctccagagattgaagatggggtccaggcagcttggatgattatcaggaataaggctgaaagaatttcaccaatagacttcttacaggggaaggggtggactgtgtgtttcatggagctagatattgggtcaccctcattcactgagaagttcctgtctatacttatcacttgagagtactttctagatacttgtagaatttccctaagtctgatacatttacaaatggcaagtgctgttcacaaaagtgttccaccacacaaccatgtgctgctgaatcagaagagggcagtgttcattaccatggcttctggaagtgcacagtggctcagaagggctggaatcacttctgcagaggacttcggggtttggagaaatatacagctatgcagaggagagaaaatcgttctgttaagtgtttccattggcttttataaaacatgaagattcagggccaagaatgaagtagaaagctaacattttcagtgattctgtcagtgctgcactatataaacattcagccagtggctttcaataacataataaatgtggtttgtaaactattggaaaggatattcagggaatatgttgggatgagtacagagttattgtctgtccatgaatccagctaagatgagcttaacgaataaaaatggtaatcaacactgtgggagcagacacaaggagatcactagggtgaagtgggaaattctggtttgtttggaaagtcagttaatgtcaaatgatgttttgctggggcacataggtgaaaggatgtcttgctaaagcattcagttgaaagaatggtttcctgtggcagacacaggtaaaaggatgtttggacattgcaaacatgtgaaaagacccgtgatgaactaacataaatatgaccccacagactgtgggacaggagcaatgaacattggtttggttcgctccgtctgtctcacctattctttgctaacaactggcatgtattggtttgccttacataactttgttgagttccactactggtgatgccaaaaagaaactcgccaaagaactgcttgtgagattcctgcagtagcttgacacttccatagcctggcctcgcaggccctttattgttattgtcctttaaaccaaatgtataaatacactaggtactcataacagcacgctggtttgtaattaaaacaaatgtccattgatagattctagaccaagctttaaatacagctacattgcctcccaacttaccatcccagggattgataagaagttccctgcattctcaataatttcctacatactatttccaaataaaaagaaaggggggctggaaaagtggctcctcggaagaagacttagtgctcctgcagaggactcaggcttggttcccaacacccttatcagacaactcacaacctcctgcaactctagtcctagaggatctgaggccctttctgacctctgtggacacaaggcatgcaagtagtgcacagatacgcatgcagaaaaagcacccatgcacataaaatctaatacttaagaaatattttttaaataagatgatgacttatttgagaaacagtgagtgctgggaagtggtggcacacgcttttaatcccagcacttgggaggcagaggcaggcagatttctgagttcaaggccagcctggtctacaaagtgagttccaggacagccagggctacataaagaaaccctgtctcgaaaaagaaaaaagaaaaagaaatgatacccactgctgaaaatcatcttctaactccaagattagatggaaatatttcattatttatttagttatgtatgtatgtatgtacgtatgtatgcatgtatgttgtggataagtcttgctatgtaaccgaggctagtctgaaacatgtgatttagaagaaaatgggccaaaggaatctagaggcagataagatagggtaatgggaggatggtggtgaacatgattgtaacaggctgtaatgtgtgtgtgtgtgtgtgtgtgtgtgtgtgtgtgtgtctgtgtgtgtgtgcgcgtgtgtgcgcgcgtgtgtgcgcgcatcatattatatatacattgtgatggtttatatatgcttggtccagtggtatggccttgttggagtaggtgtgtcactgtgggtgtggactttaagatcctcaccataactgcctggaagacagtcttctagctgccttcagaacaagagatgaaattatcagctcctccagccccatgcctgcctgaacactgccatgctcccatcttgatgatactggacctgctcacttctggacctgtaagccagttccaattaaatgctgtccttatcttataagagttgccttggtcatggtatctgtacacagcaggacaatcctaagtaaggcatacatatatgtaaaggtcataatgtacatatatgaacatgtcattactgtatataattaatgtacactaataaaaacattttaaaaggacatttttcatcatttctaatattattaccattctatatcaaaaccagataattatttaaaacattaattttaaagttcagtaattagacttacatcagtttacatcaattttacgtaagcattggatgcatacataacgcttctgaagagctaaacagagactgcagacatcaacactgttgcagattttcatgccttcaaagggataccagagcaaaagactcttgtttcttagttacaagtgctggattttaaaatagattgattttaggataatccatattaaagcatttaatataaaagaaaactggatttcttcctttatgtttcagagactaggactccatatttagaccactgtgctcagaaatacacactttacaatgtgcatatactaatatttatctttgaagattctaattactaagtaaaacaacaaatttcattctatggctgaacatttctagagttgtcttgtgtgtggaagagaaatgaaaatgaccttgaagaagggcggaaagtgggcaagagtaaatcaatagtaaggcattgcctagtgtgcccaagtcagggcttctgtccccagcactgggaaaagaaaaccacttgggaaatctcagacagcagaaagagaaaacactaaaggattccagaaagaggagaagaggaagactagtttgtaatgagaatgatcagaaaggcatgggatttccagatatggtggcatccctcagtaataacagcacttgggtggctgaggcaggaggatcatgggttcgcgtctacctgggttagatagcatttctatgatagtttgggctacatagagagaccctgtctttaaaaatctgtataatgagccaactaaaaccaagatgaaacaatgaagagaaaaaaatctagaaagggagagtgtcatgggagcaagggatgaagacataggatgtgtccttcacagagggaacagagggtgggcagagaccatccacaggtaagacatggacagtgagggaataatagttgaagcacattcacagtcaagagaagtcattttgcttacttgggaaaaaacttgttgtgctcttgtattgggtcgtcaccttctgtgcacttctccatacatcctccacaggaaaaacactggacaatgccctttttgcctagaaaaggaatagggtcagttcaacagcacctacagctgccaactcagaagaacataactccagattatccagtataatcctactttcatctccagttggattctgtggccaagtcatgcaggaggaaacggttcacacaggactcttggtccttcagtaggctggtcaaccatagtcactgaatgttcctatgcagcacatactttgataaacccatcatcctaaatgatttgccatcaggttctggaataggagctccatgagagcagaaattctgtctgttctggacactaatgatatactggatattcacagaaacaggcaatcaacaagcaattgcttactgagtaaatcagaaagaatatactcatagctggggtggggcagaagtacaaatttaacagtatctatgcaagctagattatgaagaatcacttgtctctccccacatcactgccagctaaagagatgctcagcctgaaagcactgactgctctcgcaaaggagtcaggtttggttccagcacccacatgatggctcacagccatttctaactccagtcccaggatcaaacaccctgtctggcctctgagggcagcattgcagacatgtcacacatacttacatgcaggtcaacacacacacacacacacacacgcacacacacataaagaaaataacctgactcacctgtgtagaaaaggccagctctgaccaaagcatcaacagccacaggtgattcgtggggccagtccttaaacgtgtccatccttagttcttcattagcgaagacgctgtcgttgcagtaagcttgggggaaaggatgcaggtgagaccagtaggctttgatgttaaaatttaagtcagctgtgttcttgcatgagtgtgtgtgatctgtgtgtgtctgtgtgcttgcatgagtgtgtgtggtctctgtgtgtctgtgtgcttgcatgtgtgtgtgtgtggtctgtgtgtgtgtgtgtgtgtgtgtgtgtgtgcttgcgtgtgtgtgtgtgtgtgtgtgtgtgtgtgtgtgtgtgtgtgtgtgtgtgtggtctgtgtgtgtggtctgtgtgtgtctgtgtgcttgcacatgcatgcatgtgctcctgtaggtggaatgatctgatgacctgtgcttggttagcagagcaggaaggtgtaaaattcaagagtgaccctgtcagaactatgggaagagagtggcaaagaatgggttactccatgaattcattctattcatttctgtgtgtgaacagtgtgttaaaatgtcacttcagactgtccttaaccttgtaccatcaggatacaacaaaatcgagaggtgattcctgcttcccctgtggcttaaaaacaatcattttggtggcttgctctgtgagatgaaaaagattgagggtggggtctccatcagactttctaccccatcctggcctctggacactggttcctgcatttcccatgctgtgaggacttgaaaattctattgcccttaccttggtctcacaagtttctcaagctgaaatcttgcttgcattcacacttcaccttagatcaggagtgtttgcctttgcttttagtgtttctttggcatatgaatactacactttaattaattaacaacaaaaagatttttacagttaagaaacctttattttattttatgtttgccttctactaagccatgaggtcacagggaatatgttctacagttttccttggtgcccacagggtgttctctggttggagcaggctggcacttcagtctttctttggcttccttcttgacctgatctcttcacctatctcaggaagcttctcaaagcatacattttgagtgtgttcatgtttatgaaggtccatgtgcatgtacggacccatgcctgtggaagtcacaggacacacttcactgtttctccctggttgttagggaagctgtctcacttcccaggccaagttgtggaacaccggtatccatgcctctgcctccccaacagggatcacaaattcacaacaatgacacctggcttttgtcacatggatcctggaggcagaatgcaacgtcttgtctttgcaaggaaagcactctacactcaatggcccaaccctgacccttagagttcctaatatgctcaatgcactcagtctctgcccaggaactgccctaacttgattgtttaataatgacaagagcatgctcagtaacagtgtagactctgccactattgctatggtaacattcatgtaagctgctactatggagacacactggaattagctcaagtcctgtgtatgaacaatactcttaacatctgagatgttccttctttcccatgttgatgggaggtggcaaatgatttgctatgtagtaagctaaacttactaagctaagcttcaacatgtgatatttctgcctcagctttcttagtgctgggattacaggcatagacctctctgtacttggcactaaattcatatagtctgtacccacctctaacccaatgtcatagttcaacctggccataagtgcctccttccaagagcagcaattgcaggagtgagaaatcctaccatagaattcttatgtgcactctcccttgtccccatgtccctgacctctgctgggcctgaactcagagcctgtcctatttgctatatagatgctctgctgacctaaattactaacaccgaggtttcattttccatggatgctggaatggatccagaagaccttgcccatgctggccaagcaagtactatcctcatacctgttacatgattttattgtgaatattcctgaatttcttaacagcacatggagccatttaagactacatttatgtctgtagatgtagctcagtcactagcacgctctcctggcctccacgaaggctgaggttccatccccagcacctgagaagctctgactcagaactcagcaaaagggtcacaagttcaaggctcatttgagtgtgaggccagtctgggatagaagaaacactaaaacttgcttccaaaacattttatccactattttagttgtttgaagggaagcatctgttacagcaccaacactacatacttagttatgcatatctacactaaaaactaagtcacttaatgaatggatccttggtacagaagcttgccactaaacctaataacctctaaattaattctctcatggtagaaggagagaaccaagtctatataaattgtcctctgacttctgcacctccacacatgggacccatgggcatccacatgcaatagtaagtaaataattgagtctataatttttacatttacttttaaatttttctttatttttgtctgcatggttgcctgcaccacacatgcacagtggccacagaggtcagaggaagacactggatcctctagaactggatttgtggagttgtgagttgccaaagggtgctgggaactgaacctgagtcctttccaagagcagcaaagtgcattaaccactgaaccatctctcctgctcataaagtaacaacaaaaacaaacccaaaatcattccataatagagaaatcacttgtgaagataagttttaaagaagggctggagagatggctcaataattaagagcacggactgctctttcagaggtcctgagttcagttcccagcatccacatcagacagttcacaagtgcctataactccaccatcaagggatatgatgtccttgtctggcttccaaaagcatctgtattcatgtggcagagggagagggagagggacagggagagggagagggagagggagagggagagggagagggatattgatagggagagggagagggagagggagagggagagggagagggagagggagagggagaatcaaagtgtttggaatgtgtctgaggttttacctgataccataggtaattctcttctgacccaggaattcacaaaatgttctccctgtggaaagaaatttggttactgactgattaacttatagaatataatccatctctgagctgcaactgaagacgtttctccactaaagccaagtttcattagagcagcagaatttgggcaaatcagtcctttaattttggtttgatttttattgatttggaggatttttatgcagttccaaacatcagtgaaatggaaactttctcagggtcactcttaccagacacccagctcaacaagagaactgcagttacacacacagatgtatttgactcatgaggaactgagacatgggaagagggctcacatcagaagggcctctccaactgagcaactctccctctgagagaactgcacccagactttcagcccatgctgtctgcagatgttgcttctgagtcagtcagcaaatgcatctcctttggcttcagtttcggttgtgtttcccactgccctcactagtttgagtctagatgctcagctgcaggaggcatcttgagtgccctgcctctgtcaggtaccacagagaactgagtctgacatccaaatggaaacagcagaagggtgctaggggagtggcctcagtcagagggaagatgaaggaggcagaagccacccacagccagcatggaaaaccaagtctacatggttccagcttaacaagagaacatttttgttttcctctctgtcagccagagatgagaaagggcgaaagacacagaatccgtcagaaaacaaaacaaacaaaagccctcaccctgacaattcagatatgattaggtaaagaacatgtactattggaaaaagttggctggtataaattaccgttacatgaacaaatccctcatagccttggatatactgggcaatttcctctgaagatttcttactttgaagaaattcacatctgtaattagaaatacaattaaaatatacccctataaatagagatgttctacattccaatgagcacttgataaaacctattgaactattgggctttaaatatcagtaaaactgtcaaaaaacaaaacaaaacaaaacaaaacaaaaacttgccccagtagtatgcacaagacctgagcagattcaaaccagatggacccctgaaagtgagaggaagaagtagacacaaggccccacccctaaccaggaactatttgcaactgatacctgctgataatgggacgatcgatttctccaatggcatgtcacagggtataacaaaacactccagagcaggccccatgcccaggaatagttggtcaacacaaaacaaactacacattttttttttactgcttttgattgttttgatttttggctgtttgttggggagggtgttgaaacagagggagaaagaacatgaccttagctgagtaggaagtgggaaggatctgagcagagttcggaggggggagaatgtgatcaaaattattgtattaaaattttaaaaaactcatcttactcatgagaattacaagtgttctgataggactggagagatactctcttctggtatctgaagacagctacagtgtgcttatacacataaaataaataaatcttttttaaaaattctacaaaaaaagactttaaaaaaaacaagtgttctcatagaataatttttttatattaatgacagcacatatagctttttaaattgaatcttcagattacttttgtttttattttaaaatgaggtgttcctgtgttgacggtaaactcctgggctaaagcaatcttcctacatcagccgcaggagtagtataagcctgttctatggatctctgctgtcagtttccttaaaccagaagtgcaaaacaaacaatcgaagagattgatacagactaaagagactgcgaaatcttttgcctttttgattcagctgagggcggctaagcctagtacccatgatcagatcaaggacagaaaaagaatcagtgtgaaaattagttgtaacataatgaaacaaaaccattatgattatttttaaagtaacattaaatctattggttttgatttttataaagtatgttgaatatcatcttgaaatatattccttttccataaaaggaaagctactttttaaaaaagatttgtttagccaggcagtggtggcgcacacctttaatcccagcacttgggaggcagaggcaggcagatttctgagttcgaggccagcctggtctacagagtgagtttcaggacagccagggctacacagagaaaccctgtctcaaggaggcagaagccacccacagccagtctgaaaaaccaagtctaagtggttcagcttaacaagaaaacatctttgttttcctctctgccaatcacatgcaggagatgtttattttatgtataagagtacactgtagctatcttcagacacaccagaacaggatgttggatcccattacagatggttgtgagtcaccatgtggtcgctgggaattgactgctgaaagaacagtcagtgctcttaactgctgagccatttctccatcccatgaagctacttttaagattaaataatattcctctaactgacactaatgtttctttctaatggtgtgataagggactgaaaactcttttgtcaatgggggtgagaccagccttctcctcttacattctcaggagaagatgaactccatcacataactcaaatattctcaagggcttctgtccactcggtgtctgtggcatccagggtcctggctacatttttcacatatttccttgcactgcactatgcctgaatgtaacccatgtaagccatatcacatggggtggactacagtgaattgggtgatcaatcctttctaaaataccgtaataaatcaacttgttttaaaaacatttcaatacttgtttcctgttgagataggattctggatggcacaggctcaccttaggctctttaaatatcaaaattaaaaaccttccatttctgatcctcttggctccacctcaacagacctgggattacaggcacctgatacatgctatcattcccacctcaatattactttcttaagccgtgtatggatttagtttaatgcttgtattatgtttttgggttcccaaattgcatgagaagcctacatgtaagacactgtctccagctggttctgattggtgaataaagttgccagaggctaatggctgggcagggagacagaggccggactttaagattcaaaggcaaggggaccagagaaaaggcagtgccaccatgctagagaaacacaaggatcaggcctgagaagtgcaggacagagagacagccaacatgtaagagtcagggaccgcggcccaggagggctgaaggctgggacggccaagatggaatataggttttattaagaaataattcaggaatattgtaagggtgtgttagctacgtggaggtttggaagtggccccaccataggtgtggtgtgtgtgcatgtcttacgtttgataatccacaatgataatcaagaatattggggccgtgagtagcaaggaactcacactgctgctgccgggtgagtagactagattaatcaactacggcaacaaaacggtatttttaaaactactgcaattgctagggatggtgacgcaaactgcaatcccaagtccatgtttcaaaagtgaaaattttatcacaacaagcttacactgattattcagtttttaaaagtttgagaatatccaatattttctcaatatttcataaaagaagtgaccaggcagcaattaaaactgatgcacctgctcttgtgtgagcagacctcgctccttccagctgttcggcctgtcactgaactgtctcctcttcctgtgtgagtcatgttccatctgctctgggtcagagaagaagcaaaggacccctagaggcagacgtgcagctctacttagggctgatgacagattccctgccaacagtgtccagagtacagccaacaacactacatgcagggccctgaggacaactgatacaagctgggccagagctggtttaggagcctggaacagcagcatgggctctgtctgagactgaagtgtagcaggtacatctgcagggtacactgtgactcccaaagagcagtagtggcagtctatgaattgctaatcacggccgcactgttcctacaaccatctcatcccttctcaggaaacatttctccctcttactctgtcttcacttatttctctttcctctttattccctcttcccttccaacctcctcttctcttccttccttttagacttcttttccaaataatctaagtgaagaaagcaaaggaagagggagaggacgcagaggagtaggaagaagaaggaaagaagagcagaagcacatggcctggagaagccacaggttctaagaggtctcacagatgtggaagatggtagtgtagtgtagtggtaggtctccccagtctagatgcacagcatgtattcatattaattgagtcatgttttcattgccagagcttgtgtgggttggagatttaccacaacaaagatgtgaaattttctcaccacctcactgctcagcaaacccaagcccaagatcatctatttaatttatgtcatctcataactttttctgcacatttcctaacagattgtcatatagtttaagaatatttaaggctgctcgccctacatgggctgtgcatatttatgtttccatttaaatataattctagatagcctttcatttttgtgagcatgctgcctatgtgcaaggtgtcttgtaaatacttgcctatttggtttgagtgtgaccttgcatctactcaggaaccttcctatacacagtagtgaactacaaatatttttttaaaaataaataaaaaactcctatgcacagtgatgcacatccaaatcctagcagatcagaggctgatgcaggaggataatcaagtttaagccaccctgggattatataaagagaccttgtctttaaaataaaataaaagcccttccaaccaaaataccagtttactgaaattagagaaaagcactgaaaacaaacaaacaaataaataaataaatctggctaagtgtaaagtatagaaaattatacagggcatgttaagtaacttctttaaaaaaaataacagacaaggaaaattgtgaggaaaatgaaatgtataattctgggctggcaagacaggtaagggagtggtaggcttgctactgaaactgaaggtctgaggttgacacatgggactcattctcacagaccatcttctgccctagcatcctggcatataaacaacatccccaacccttccacacacactgaaatctggtttagaaacattaaaggatgggtgggaacgagcacttgaatgcggattcagatacttgaccttgggcatcaatgccatcttttcctagcagacttaatgacagtgtggctcaacttgttattaaagtcttctatgctataatagtaacaaattctttatgcagcacctggaattcactttgaagtcacctgttattgttattccatggaaaacattagcaagagatagatggaacaattcctgaccgggtgctgacaagtgcttattactgctccttttatttttatcaatcattccataatgaaagcttgaaagccagtgaaaggaataaatttttatttggcagaaacaaaaacaaaggaattacaaaaccagtacgaaacactaaaaatatttacaatatagtttttctaagcagagacgtacaataacaaaaaccttgaatctctgaacaaaacatctgttctcttatgacactaggatgtgggcaactcaggactacctggtcctctctcactttagcagagggtggctttgaactcctgattctccagtatccaccttcctaatgctgggtgtgtgcccctgcacccagcaagcattttcatttggtgcatatgttgcaggatgtgatattatcttaatgccttaaacattcttgctttctgtcatgtctacaccactgcagccctgggcagactaacgcatttattagttagggtaagtcacacaactgcagcttgacaacgcatcttagtatttggaatgataagtagatggcttggtagataaagtgcctcagcacaagcatgaggatctgcagtttgagtcccagtgtctacttaaaggtggggcatggtcacacttctctaaccctagtcctggggtagcggagacaggcggccctagggctcactgtccagctagtctagccaatctatgagttctggttcagtgatccctgagagtgatgaggtagccatgctcggtcaacctgaagaagtccacatatatgtgtatgcacacacacacacacacatgcacaaatatattaaaatgaaagcgaaatagaagaaaaaaacaaagtgcccatgattcaaatttgttacttacattacttgaaagttctggggtacatacagacaccaaactcaggccctttgctggatgccaagaagtgcttactgacaggagcctgatatcgctgtctcttgggaggctctgccagagcctgacaaatacagaggcggatgcttacagccaaacattggactgagcaccaggtccccaatggaggagttagagaaaggactgaaggggctgaagggatttgcaaccacataggaagaacaacaatatcaaccaaccaacgcccgccccccccccagagctcccagaaactaaaccaccaaccaaagagtgcacatggaaggacccatggctccagccgcataggtaacagaggatggccttgtcggacatcaatgggaggagaagcccttggtcctgtgaaggctcgatgtcccagtatagggaaatgccagggcaggggtggttgggtgagtgggggaagcaccctcatagaagtaaggggagggaggatgggatagggtgtttccagtggggaaaccaggaaaggggataacatttgaaatataagtaaataaaatattctataaaaaaagaaaagaaaagttcaggggtgatccacataggagaaagatcagaactcaagggaatattccaacaatgtggcacttttgcatcctgttttattttgctttgtaaaaaataaaatacttatccacttacttggggaaccacttggcatgctccttccaggggtcatctccttcttcccagttgcccaagcttccgccacaggaaaaacactgcacagtgtcccttttacctacagatgcaggaaagggtgtgactgaccggcaatgacaccagctgtgtcttggagctggctatactgcaccagaacaagacagactccagcatgcctgttctatgtaggggctacagaagtgctctagcactcagccatacccacagcccactgctggtacatttaaggtctatatttgaagaaaagttacattttacttaaatacacaggcaaatacatggctgcatgtgtgtgtgtgtgtgtatagatatatagcaaaccaataatgctacactaaatacatattaaagcagaagcaaaattgttacacttaaaatttaatgaactacatcttatgtctaatataacactcttcatcagtgaatgctcatttacaaaatattgctcacaaaatggaacctaaactttaaatacctcagaaatgcctcacaaagtggaatccacttacctgtaaagacaaagccagctgctgagagtacacgtggtgatgtcccatgggcataaaatggccagtcctcaaaggactccagtctggcctcctcttcatggtacctggctttgccacctctcagcatcttctctggactcttcacccggatgtcatacttgccaatgttaccaacatcttttccctgaaggaactcacattctggacgtaatttcttgtgtctctctatgggaagcttcctgaggctattgccaaagaggatcaagctacagcaaaagcactgaaccccaagtttcacccctgtgtggtaaaacccagcagctgccatctcctgtggcgtccatgatctgaacgtgtcataggtctcaaaggtctttagtcgtttggcttcactgcgcatctgtgagttaaaacctttcttcattttcatccgttctttatgctcttcttcttcttggctctttgccagctgaactgcatccaccccgagaagagcagagagctcagggagaaattcataatcaatctcagaaatccgatcctcggaggactccccatgctcagccattttctaaaggaccaaggaaagcagataatggtgataggaatgttttaactataaagagcatgggttcagcgcccatggtgcagctcagtgactagacacttgcagctaacccctggatccatgtgctgaaagaagagaactgactccaagttgtcctgactactacatggacacactcatgcccctaccccacactaccaagtaaaggtaacaaaagatttaaacacagatcatgttctaagcttttaatgaaggcagagatattaaagtaatacctggattgtcaagacaaaaaggacattgttttgggaaaatacaaaacatcgggtttcatgttctgactcgagaaataatcactgtgtctacttgtgattccagcaagctgactagcccataagaacaaacagtgaacaagacaaataagcctgggtcaatccataaaggttggttggttggttggttggtttgttcatttgttattctgcgatagagtcatgctatgtgtcccatgctagcctagaacttgtggtcaaggagcataggagactgtttgtttggcctgagatcctatttggtttgggttgtgcatttgtctctcttacactaacctacattaacagcacacactcctccttcagatccaccctgcactgggttcctttcatctctgaaccactcctgccaacatttaagtttagacaatgcatagcatcaatgtattaggaaggaagaatggacaggctgatctagcctgaactggtttggggcacatatgcagggaagtcaaactgtgtcttcaagtaaacaattatggaaagctgcttattgactgtgggctgtcaggtgtatgggaaagagggggaagggagagagcctgcatccagccagagttcctgtgctctggacaggcagacgctttccacttggccccgggtgggcatctggctgtgtaaagccactgacccaacacggcgtgtggtggacaaggggcagccaccaataccaggttcaaagatgagatcaatatgctaaaagcaaaacctttccccaagttttaacatttcttcagagtaaatttttgaaataagaattgctgacctgggggccagagagatgactcagtggttaagagcactgattgctcttccgaaggttctgagttcaaatcccagcaaatacatgatggctcacaaccatttgtaatgagatctgacgacctcttctggtttgtctaaagatagctcctgtgtacaaataataaaatctttgggccagagtaagcagaggttctgagttcaattcccagcaaccacatgatggctcacaatcatttgtacagctatggtttattcacataaaataaataaataaatctagaagaagaagaagaagaagaagaagaagaagaagaagaagaagaagaagaagaagaagaagaagaagaagaagaagaagaagaagaagagttattgctgagtcaatcatacatccaccattgatattctggattctgtcaggcactgtctctagttaacggtcccctgaggtccttttaccttcagttcagtcaggctcctgcttcttcctcaggtggtttcctgcaatgagatttcccatatcagaactttgtgtctctctaacaggaactaaagtctgcttacaaaccgagacctgatgtcccaagggagaaggagtctccatggcttcctcgcccagcatcccagtgacatccagggtgacaggcacgagctgtgaggagaggctccagtagtggccacaagtagctggtacttccttgaaacaggttttgtggctccatcaggacccattagacaatggctacttgaagttttcaaagagtgtcctatcattcaaagccacacatatatctaactcctctccaaacacccagccaacaaaacccagtaattttgaaaattaggttgcaaaaactttcaaacataatatgtgattgctccaggaatccagaaaatagctagttttttttatccattttatcttcatctggcatctagtaaattaattatataagttgggggtttggagagtaacccaagtttttaccatttgctaggtcttgttttccttagctaaccaacccatcctagtggtcacctgattcattggaactttcagttacctcactcagatttgttcatgtaatggagcagtacttctcaggtgaatcaaattgaaactttccatcaatagtttgtaacagtaagcaaggggattgaaatatcctctggaataggcactcacatttagacccatcactcctgagcagaggcaggtggacttcaaggtgagttcaagaccatcctggtctacaaatcaagttccaggacagctatatattcttggttagtcttgaacttgtggtaatccttctacctcgtctcccaaatgctagataatttagtgcacttttattacattttaaaagtgtgtgtgtttgtgtataaacatacatgcatgacacctgtgttgaagtcagaagacaacttgtatgagtcaggtctctttctacaaagtttatcccagggatcaaactcaggttatcaggtctacagactttacttggtgagttatctagccaacccacttaatgcattcttaaaattctatcagttgaggacaaaacaattagaaggttacaattcattacatccactatcatctgcaattaacttcctgtatcatcatctttttaccacagtgtggagagccgtgagcaattgccatcacaagcctccgctgtgcctaactggtaaacaagtaatgtgcacaggtgcaagagtaaattcgtgccaagtcactgcccatcccggggcatagtagtggggtaatgagtgagcagctaaacaggagctgacacgtcacatggaggggtatataagcagcatcattttccttgttcgttgttgttcttcttttgcctatgcaatcaatgctctcccaataaacgtgtgcagaaggatcctgttgcagcgtcgttcttcctggccagttgagcgtgtgcagagcgcgtgcaagaccacagaccataagaaatttctgaataatgcgttgcagttatacaatatacttgtgtcttcaatgaaggctgaatcgatcaacattaccttatagcctatagatctgtggttcacaatctgtagggtcaaaggaccctttcacaggagtcgagtaagaccatcagaaaacactgatgtttacattaagattcatatagtagcaaagttacaagttgtgaagtcataacaaaagtaattttatggttggaagtcaccacaacatgaggaactatattaaaagttcatataactaagaaagttgtcaatcactgtaatacagtgtttcaaattaaatacttaaataggcctaagtaattctaaatgtttgaagtgagagatgcacacttgtagcacagaggcgtgacggaaatggctttctgattagatctcagggctgcttcacataggagaaatccatgcctgccactgtaaaccaggctgaaagcctttggttagactgggtatggtggcacatggttttaattccagcacacagaaggcagaggtaggaagatttctgtgagtttgagataagtctagtctacatagcaagttctaagccagccaaggctgcagactgatatttttttaaagtgcctgtagctggaaggtcatagaccctatggggcaactactctaattacttttcttttatgatattgtgataaatactaagaccaaaagcaacttaggaaaggaacgatttctttcagctcacaagtccaagtcacagtccaccactaaaggaagtcaaggcaggagcctgaagacaggtctgcctgctattccacacagcattacctccaactaagcaactcacttcacagtcaaagaagaaagcattaccttatgtagactgttgcttgtcagctggttcacagaccagcttataatcagctagcctttttataaaattaatgatcacctacttagggatggaactgccttcagtgggctggggcctcctacactgattaacaatcaagcgagtatctctacagagcaataagatccttgaatttcctcaactgagattctccttttagatgattataatctgtgtcaacctgacttccaaagccaaccagggcagcaacctattactaatgttgtactctatggtcatgtcgtcaaacagcttcctgaatgcttattcctactgattactgtagctctgtcttggtcaaagaagttctttctggacccagatgtagctgtctcttgtgagactatgccggggcctagcaaacacagaagtggatgctcacagtcagctaatggatggatcacagggcccccaatggaggagctagagaaagtagccaaggagctaaagggatctgcaaccctataggcggaacaacattatgaactaaccagtaccccggagctcttgactctagctgcatatgtatcaaaagatggcctagtcggccatcactggaaagagaggcccattggacacgcaaactttatatgccccagtacaggggaacgccagggccaaaaagggggagtgggtgggtaggggattgggggtgggtgggtatgggggacttttggtatagcattggaaatgtaaatgagctaaatacctaataaaaaatggaaaaaaaaaaaaagaagttctttctgcagtggggagaagtcaatgtatgaattcctacttgaccaaagtgttcagaataagtaactcttgaatgatcagccataaaagagacatctatatcaacctcacccccatgaggcttaggaaacatcatgcatgagaggtcaggaggaaaataagagctagagaatgaggaagaaagccgtaaaatgtggtttttctagatatgacatggacattgaactcatgaactcaagagcagctgtggttagttgcacaagacctcataaccttaaggcagtcagtattctagcatagacagggaggggctcataaggtccagtcctaactgaataatttattggcagtttacagatgctatggaacagagtcaggtgttttctgccaagggtgtggccagttgtagatccactatgacacagagcatgaccccatacccatacagacagtactagttgaactcagttgttgatgaaaaaagaaaggacatgaagatgggaaaggacctgtatggggtgtgtgagtaggaataaggggggtggggtgtgaccaagatacatcatatggatgtatgaagctttgtaaataaagtacctaaaggattttaacacacaaactaacagaatatatgcagtcaataaatttttggaaaaattttaaaagatataccatatatatcataaaaagatatatgtctttttaataaaaaaagatacttgagactatcaaataataaggaaaacaatatttttaaaaagaactatctagagaaaaagatttctgggggctggaaagatgggtcagcaattagcactgactgcccatccagaggtcctgagttcaattcccagcctcacaaccacctgtatgatgctgcatgggttccgatgcctgcttttggtgtgtctgaagacagctacaatgtactcacatacataaaataaatgaatcttttctttaaaaaggaaagaaaagaaaaagatttcttccacattatatcagagaagcctgaactggccagattggcttgacttttactctcccacatcccagaatataaactctccaggctggagactacagtcttagggcatattcgacatgacatagaaatcatggtgccaggattttgagacagctgatcaaattgtgtcttcagtcagggagtagagagcagttggtgggtacctagtttactctgccttgttaaatttacatattctggacatttcacaaaactggacagtaatatatagtcctcctaattagtgacattcacttaacataatactttcatgatacaaacacataagatagcttgtgtccatacttgacactgccttgttaaatttataattttgtatatgtatatcatagtttatctgatcatatttatcaggcatatgatttgattataatattgtagagtttataaataataaaagtgcacatattaatgttcaagtgtaggaattttttcctctaaaatctctaagtgattttcacacacacaaattaactgcctttgcttctaattggcaagattagttatgtcaatacattatgtaccatggaatagtcacaccattaaagtttcctcactaccttcaggctattttattcagaccactacaaatgccctgagatttgtagtccacactgaacgcccaaggccttcatcacatcacattctttgctgatttatttcatttagaaagaaaagaagtttcttagtacacttcaaaaacagcaccaggcatggcactaacagaagacctgcctacttgggttttttgattctttctttgatatggacatttgagtcaggaactgaccatgtagttctcaatagttctgtctccacttcctggttgctgggataatgggtgttttccaccatgtgcaaccataagaactgctttatagacaccgtaagttctgcctttgtgtcagcagaaggcaaggctgtaagaaattagaaatttgctctgttgctttcacagactgaggagttggtgagacagaccctataaccagttactggctttagttaccaaatcatctgacatttcagaggtaattcctttaatttcctcctttttggaggccatttctaatcaaaattaccatctagtttactaggcctgagatcttttcagtctcattgttccgtcctaatgaatgacattgttcttcgggtcatcatccaatacaaaagatcaagttagtctaaaacaacctctttctattccaacatctgactcaggctagaggtcatccacttagagaatttctgaaaagtaaatcattacttagaccaaagggaaccttacaaacacctcactgtctgctatgaccaatcctcaggtccttgtctgcattttcagcatctcagttaccccacaggagtattcgatgcatacctatagctagagtggaacagatcctcattataacatcttacacactctaccttgatcttttcatccagaatgaaatttgtcttctacccatctctctacaaaaactgcagcgtactgaaggctttcatttgttccattcatttttattttgctttagggacagggtcatgctataaacccaagttgacctcaaagttgacaccatcctgcccagtctcctgagtgtggggattctgtgcaaactgaagacatttaaggtaaagtacaccttttgatttaaagacacatctggcagtcaagtaggaatgatcacatttgggctggtgagatggctcagcggttaagagcactgactgctcctccggaggtcatgagttcaaatcccagcaaccacatgttggctcacaaacaccaataatgagaaacaaattttaaaaactctatgggctggagcaagcggggccaaagcaagaaggagaagggaagtgcaggatgggcagggggaagaagtgattgatcacatttaacaaaacctaataatattttcaagacaactctttatcacttgtgtataaagtccccagaaatcaggcctctgaagcccaacaggaacagggctgcttaaatctttcactagttatctttagtggtcttgtgatgtcttccccttaaagtcgccttaaagatgacgagacaaaggtcatggtcttaatcaaaacacacaattacccaactctagcttcctgttccacccctttacacaaggaactggccatggcttggcagctttgattagttacttcatgttcttcaacacaagctgcagtattccttttgctgggctaagataccctgacaaaagtaacttaatagaaaaaaaggtttgttcagacttacaatttgaagggataaattccaccgtggcacggaaggtttggtagaaggatcagagtctaccggtcacgttacattctcagtgaagaagcagagaaagaaagaattgggccaggctataaacccataaggctgtatccaactactcactccctctgatgaggctccgcctcttaaaggttccacaaactgttcaaacagcactagtagctggacaaaaatatccaaacacaagagctactgtacaatcatttgacaataatcaagaaccagtattctccaggaacttcctatgtatatcccacctcatcgttatgctcatctttcttttattaaataaaatgttttagtatgtgtatgcttgtggtgaggtttacacatggtagaatcatgtggtgtagatcagaactcccctccaactaggtaaatcctggggatggccatctccccaactgactgttttgcataggatctcacagaagccctttaaggaaaaaccaagtatttgaggaactaaaactcaaatttcacagttgaggaagctactagttaaggctctatattgtattaacatggttagtcaggacccaagaagataataagtcctagaagatgtatttcattttgaacaatttaggattttagtttttgtgacactattcttggggagacatctactcagccctaatagggaaccaaccaaagaataccaccaaagtcctacttgaggccaggtgtggtggtatatacctttaatcccagctagccagagttatacagagaaatcctatattaaaaaaaaaaaagatctggggctggtgagatggttcagtggttaagagtgattactaactgctctgatagaaattcaattcccagcttccataccaggcagctcacaattacctgaaatatacatacatacatacatacatatatatatatcgcttaaataaatctaacttgatttgatccagtgagttttactaaggttactttacaggaagttgggtgaagagttatttatggaagcagaaatgactcaaaagttgtatcatcccagcacaagagacagctcaccacagctagaaacccagagcataccatactacccataggcagctcaggctgaaaagtgtaccttccaggtagttctattgttctgagccacttccaatcagtttagctcatctcagatggtttgagattgcatctaggtagttctcaccacttttacatgcatagggagggagaggcatagagaatctagtcagtttcaggaacttcctgaagcttttgagttatttactttttgaatttaacagttcttcctgcaggatggatgttttgcctcctttcaaacaccctgtatcttaaggagcttctctccaagatgaaagacttttgttgagaagctggctgatctaaggctctcagaagcccttatgaaaggacaaagggaattggcttctatatctttgcagattagacaagattctgactgggagcagagccacaaccttgaaatttttaagatttcagttcatgggaacttggcatttcagccttgatgagactggtatttcagtgccaaggctgctttgtggtagggtctgtgttgcacttaaaatatcctgtgggctggagagatggttcagcagttaagagcactaactgctcttccaaaggtcatgagttcaaatcccagcaaccacatggtggctcacaaccatcagaaatgagatctgatgcccccttctggtgcgtctgaagacagctacattgtactgaggcataataaataattatatctttaaatatatatatatatatatcctgtgttccctttgtgaaacatttcttcattaccttcctgctgacttcatcccaactgtataattattttctgctgattttgtcccatttcacctataaactatatgtaagatgctgtgcttcttttgtttgtttttatttgtcttgagacaggatctctgtatagccctgactttcctgaaactcaagtagaacagactgtccgtccttaaactcgaagatccaactgcctctgcctctcaagtgctggtattaaagggtatgccacaacatctggcctgatactgtacttcttaataaggttccatgagcctcagcttgtgcaagacctcctgatcttaatcgttctttattatctttcttttctcatcacctggtcattcttcttaggactctgtcgctgaagaaagacccactagtccacgttagttttaatgttggaggaaaatgctatgcaaaacctagcttactctgtgttcctctgataaacaccatgacccaaagcatggtgtggagtgaaggggttttatttcaattttcaagtaacaatccattgtcaatggaagcaagtgcaagaagtcaaggctggaaactggaggcagaaattgaagcaaagaccatggaagaagagtgctgcttacaggcttgctctcatggcttgctaggcctgcttttgttactcaacccaagacaacctgccgaagggtggaattactaggtcctcccgtatcaatcattaatctcagaaatatcccacagacttatctaagaggctaatctgatggaagcattttctcagttgagtttctctcttctagataactctaccttgtgtcaacctgaccaaaaagcaaaacaaaacaaaacaaaacaaaacaaaaaatacaaggatatagttaataattatttgctactagaagattgtctttgatagtgataccttctggggtttttgtttgtttgtttgtttgtttgttttattagggtttgaaggtgagtgttgttcattggttttttttttgttttgttttgttttgtttttacatagtctcacattatcagctagtctggccttaaaatgatataccccaggttggtccctactcacaactctgatcaagtctcttaagttaaagaattacaggtactggccaccactcctgtatctttatggtgctttttaagaatcgtccttttggactgaaggagctgagggggtttgcagccccagtgtcaacctgccagacaccctggagctcccagggactggaccaaccaaagagtacacatggagggacccatggctcaggctgcatatgtggcagaggatggcctagttgaacatcaatgggaggagtggcccttggaccttgcgggtgtttgatgccccagtgtagggaaatgccaggacgggaagacaggagtgggtgggtgagtgggagagccccctcataaaggcaggggggagggggatgggatagggagttcctgaaggggagaccttctgaaagggggaaacatttgaaatgtaaataaagaaaatatccaattaaaaatcttcctttcattctttttttttagatttatttattattatacataagtacactgtagctgtcttcaaacacaccagaagagggcgtcagatctcatcacgggtggttgtgagccaccatgtggttgctgggatttgaactcaggaccttcagaagagcagtcagtgctcttacctgctgagccatctcgccagcccccctttcattcttaatataaaaatttccaactgtgtctacatatagctctttcgatagccattgtattgggtactcattgggccttttcaagtcatacatcaaccctgggaaaacattttctataatttatttgattatttctcatatcattcctttgttactcttctcttcctagtatccccattttaggggaagaaaattgatactttatcttttttctcctcatatatttctccatattgtgctaatttctgagtttctttatcttgattttgtgtggaggtgggtaggtttgctgctgggattgaacccaaaccctatgtgtgccaggtaagtgttccaccagtgagtcacatccccactatattatattctctctccctccccctatttctcacactggctttgcatttgctatgtacccaaacaggccacaaaatggccatcctcctcagattcttgagtagctgacattatagcgtgcaccatcacatccagtttctgatatattatcacataatatataattagtttttgagacatggtcttgagctcagctcttttcttgaatttctgatcctcctgcctccaccacccaagtgatggcatttggtcaagcatgcatcaccagttctggcttgtgattttttttttccccaagacagggcttctctgtgtagacctggctgtcctggaactcactctggagaccaggctggccttgaactcagaaactccttgtgatagtatttttaaatttcagcaattataattgcccatggttttcttttctgtatatttttttttctggtttttcagacagagtttctggcctgtatcttccttttttaaagtttatatttgtgttctatttatttttttgttttatttttcaagacagagtttttctgtgtagccctggcagtcctagaactcactctgtatacaagaccatacagaaacccacctgctagccaggcgtggtggtgcacgcctttaatcccaccactcgggaggcagaggcaggtggatttctgagtttgaggccagcctggtctacagagtgagttccaggacagccagggctatacagagaaaccctgtctcgaaaaatccaaaaaaaaaaaaaaaaaaaaaaagaaacccacctgctctgcctcttttgaatactaggattaaatgaatgtgccaatactgatagtccaaattcatgtaaggctattattgaagagtttgctatttcctcttaatttgttgtttgttttagtttgctggattactgctgtctcttcccccccccccaatagtttgggaattgttttgctatgttggacatgtttgatcctttcctaatttgttgctgttattctgtttctttcatgtgctgtcacagaagactgtctttccccttcttccctctatagcagtggttctcaaccagtggctcataacccctatggtggctgaatgaccctttcatagaggtcacatatctgatatcttgcatatcacatatttacattacgattcataacagtaggaaagttacagtcatgaagtagcaatgaaataattttatggtttttggtgaccacatgaggaattatattaaaaggtcacagcttcaggaaggctgagaactagtactttatagtattcctttaacatcctgcaatgttggtttgactgctataaatagcaataaatagcatccatttgtgtttgtcttgaaaaaatccttattcttcaccaattgtgaaagttaacttttctggatatatcactcttggtttagagtagcttactttcagaacttcaaatctatcagttcattcttttttgggtacaaatggtctatttatatattcctgctttggtaagatgaactgatatttctcataccatgcaaatagtgtctctttactttgtatttctgacatcttgactatgaagtatggtgaatttcttcattgtccatattgattcagtattctgaatgcctgttgtttttggatgtctacttcattctctaggtttcagacattcctagtataatttcattaatctattatctctgctccttgtacaatatgccctcctaaatgcatctcagacttcatggaagtatctgttcatgcttaattttctccttatgtctctctgtatagctgtctcttcttggtattctcatcccttatgtttgttcttctgtgttctcttgtctgttgtcgatacttcccgacgtggaagtgtttttatttaattgaccatttccttcacttccagtatttctatttggtttttaatgtttcaattcccttcctgagttttcccttcatatactggactttctcctccagtttattaaattttcactctctctcttgtgtaaattttggatagatgtacttaactcatccatcttcttgagacttctttatggtcattctttcttataaaaagcaagactgaattctttctcagacatgtcacctacctcaccgactttggcttccattataagggagttatgaggtttggaatgagtgttgtgatgaattgttttgtcatttaattttcttttgttttttgtgtgtgttgattggattcttaaatttttcagttctcttccaactctctagttgtctttttgaatgtcagctatgaagactgtgaagcttggtgttgactccaaagtgggtttactgaggtgccctagaagtgacagcgtaacgacaggaccaccacacactgaccaccagagtggccacatggagtaaaaccccagtggaatgctgaactccgaatctgctagggctggagtcaaaaggccagtttcacattaagtcctgacctagaagaagagtcagaacttcagtcttacagtgatctctcagagctttggagccaacgcctttgcacaatggtcagtgctgggacctctagagacaaaagccctagcccatggtgaaccctagaggtgctaaaaccaaatttctggcttgaagataaactcagggactgctaaaaccaaaacccttgctgtactgacatctgggacccctggagttaaggtacttttccaagataaactctgagaccactacagacaaaacttgagtcctgaggtgaactctcagatggctcagatcaaaggccaggtcccaaggtgatctctgggaccactggagccacagaccagggtctgaggtaaactctgggatcactaaagtcaaagactaagtccttaaataagccaatggagcgaaggccctagttccatcctgaattgtatgatttctacagccagagaccctgtcccgcctcgagttttgacgtaatgttttttttgttttgtttttttttgttttgttttgttttgttttaagaagacagttgtttttttttttttaaagatttatttatttattatatgtgagtacactgtagctgtcttcagacaccccagaagaggacgccagatctcattacggatggttgggagccaccatgtggttgctgggaattgaactcaggaccttgggaagagcagtcagtgctcttaaccaatgaaccatctctccagccctgaagtaatgttttttaacaccactttcttaagcaagatgtgtacacatgaaaaagatcattttcaaatgcacactgccctagtttgttttctgttcctgtgataaaacttaaccatagccagctcagaaaaggaagagctcttttggttcacagctaacagtccatcgctgggggcgccaaggcaaggactcaaagcaggtgcctggaggcaagaactgaatgaagcacaggccaagcgaggtacaggatttgcatccttctttttttctttcttctttcttctttttttccatcagagtaaagattctgggatatcctgaattggcttgttggggtttttcagtgaccatatgggagggccaagttcatgttcccattgccatctccatcttcatccactaaggagaaaacttctttagttcagcagtttgttttcagctagctgatcagtcatgatgcgctaaagggaagcagagaaggggtaagagctcctgcattagggaaggggtccctccattgctgtagctgacacacctacacagccatccgactgccagaaatgtgccacagccaggactaccagacccagcttactcgctttaaaattagttttattattgagttacaataattttcttatattttaaatatgtcagtactttgtcagatatttacaatacatatttagtgtgacttaattttaacatcgtgtctctctctgtgtgtgtgtgtgtgttcatgtcctaaaacccacataaaaacactgggtgtggtgcacacagccaaaactctagtttggggaaggctggggattcctaggataactgttcaaccattttaacctcattaatgatttccaagccaataaaagaccctgtttcaaagaataacttccaaaaaaattattattgtcctctggcctacacagacacataaccacacccacactatacacacacacacacacacacacactcacacgcacatgtgcacacttaaagaaacaaaaattaccaggttttgaaatcaagctaatgataaatatatagagacccagctactcagaacaagacaaggagatgacttgtatccaggagtttgagagcaatctgggcaatatagggagaccccgactcataaatcaagtaaatttgtttttaaaatatatagcaacaggaacaacattcccagaatatggcagggagttgtggaaaggaacagcctaaagccaacccatagttttccttattttaaatactttattctaacttttgagcaaatgtctatgataaaattcaaaagacacaagcaagtgtgaagcaaaaatggcagcttccctcctatcatgctcagcttctcagaaacagtctccttaagtggtgacccatatcttcaacaatttcccactgccataacctgagtcggacccagcacagctcctcccttggattaatgccatcgccattaacacttggcacactgttagcactttcacatgaactcctttatgggtcttccactggcactgacactgtcttcattatgtgtatccctactgcttcaactcttgatgtacaatgtctaaggtctggtgagtaattaataaataacaaaggaagtgcattgtttctaggatcctgctgtgaggtgtgactcaagcagcaattcacacaggtcaacagagcccacagtccatcttgtaataacctctccccagagaagagttaaacaaatgagtcctctgtcttgtaaatctgaacccacaagaacggttaaggcactaagagtactccccagcaggctaactagccctgtggtcctttgtttcttcatatagcctaggaacccaaaactccctgactttctcctaaaccctgtaacttactgaaggtctggagattccactaacatatttcccaaacggctggtagtgcccttctttctccacattcaggatgctgcttcacggtgtaaattttctaaccattacagagatggacctggacatgggtataaggaggaagctgtgtcataatcttgcaaaaatgcttactgctctttttagtgaatagctgaagctctgcttttttcaacaaatgttttgtctctgaaaaaatgcaatttgggcatattcaccacatactcctcccagatccatccttaaccctcaactttgtgtcttttttaaaaataattcaagtctaatttgtactaccatatactcctggtaacacccaatggaatgtggtccgcctaacagtggacatactccatacgcttaagggaaactgactctccccttcatgtttcctttcttgaaacagatctcgtatacagtagctctagttgtcttgagacttgctatatagacaggctagcctcaaactaagatatcgaactgtcactgtctctgtctctgcctctccaatgttgggattgaaggagtatgccaccatacccagctcatactgtgtctctttaaagggaaagggatgctgaggtcaaacaacttacacaactaaaaaggattacaacagaacctgagaactagtaaaaagaagagatgcttttttgtctgttttctttttttttgagacagtctctctagatagacgctggctgtgctggaactatgtagaccaggcctgcctttgtttcccaagtgttaggattaaagacatgtgtcactacactgtcataggacaaaatatgtctttggggaataaatatgtaaattttgacattttagaattgtatctttcatttcttgttttgttttggtttttttggcacaagatcttaccttaactcaagatgaccctgaactggaggcaactgtcttgtctcagctttccaaatgctgtaattgcaggagttcaccatcttacctagatcatcttttatttatcttttccctacagcacatgtgtggatgccagagggcaacttgcagcaatcactttcctcctaccttgtgagccccagaaactgaactcaggtcactgggcctagtggcatttgcctctgagccctttcgtcagccatcatccttttctggatgttagtaattatttggtcttctattttattgatcaatctacttcaagatttataaattctgttgatcttttatttagacttaatgatttgtactagttcccagtatttcttttgattatattatttttactcacttaaatatatagcatatactacattttgaatgttactatgattaaaatttaaaaaaagagaaatcttaaatggaccttaaaggaatgaagagccaagaaagtggtaaatacattacatcttaacaaacagtaactgattaaagcatattaatgtcttgtgtaacagaaaaagaatgagatatataataattatatttgaggaaggagtcaaatgaatgaaggttcttttgatccttttactgtctgtgggggaggaagggacatattaactttggttgtcgtgctgtatgatgatcagagggaagctcctgacgccgccttctcgatccccttgagccctgtcttctcagagctgaggcttaccttctctactccagcactgctgccctggctcagcttcctttgctgacaggagtccaacctgaagtcaccaagcctacctgtcctgatttgtcactgtacctttcagagctgtatacaataccacactattaaaatgagaaccaggcatgtagttcagatgggagagtgcatgactcacaagtatacaccctcgggtttcattcccagcatcacataaaactaggtgtggtggctcacaccagcaagatggctcagcagataaaggagtttgctgccaaacctgacaccctgagttccatgcctggacctacatggtggaggctgaaactgttagctctaagttgtcttctgacctccaacatgcaagggaaggcaagcatgcaccacctccacctccacacacgacagacagacagacagacagacagacagacagacagactgactgactatttttctctcccttctctaggctgctcagagatgtttccttgtggccctctttataactgcacattccaagaaggcacatttgccaggaagtgcctgcatctagtcacagcttgaggccaccatgctaacacactggaccacacagtatttccccttgcattttccctgttcttcctcaacaccaatccccaggtggcacctctcaaatgaagtaacaatactttatctttgccttatgttattttctagggaactcaagtttagaaattccactaaagaataaaaacaacatacaagtttctaactaattaggaaaaatttagaacgtttaaaaatacaattcagaagatgcaatggtttaaaccaataccacaatgtatagtttgactccccaaagaatcagtggttacatgtacacttgaatataagggtactaagtatatttaatattaatatgtactacatattaatttaatttatatactaagtgtaaatggactaagtgctttaattaaaagataaaaattgtcagactaaatgacaagaatatgaagggtttaggactaattcaggatagaatgcttatctagcatacaggagactgtttaaactacagcactcaaggaaaagaaaggaaaatgtgcacatttgacatgagtccctaatacatgaccccttccccaagaaagtacacacttagtgaaagaacaccaaaataatatattatgaagttacaagaaggaaataggaaattaaagacccaagtttgattaccattctctctctctctgtgtctctctttgtgtgtgtctctgtctatgtctctatctgtctctgtctctctctgtctctgtctctctctgtgctagggatggacactaggcccttacacacactaaacatgtgctcttatgctgagaaacatacccagcttctacttctgtaatctttaaacaagacttctctcaatgattatgaaaaagtaaattccctttgaagcattgcgacaatattcatcgtaaccttatcaagcatggaaatgaaatctaaaactgggactatcccctctgacaatgagtttaggtctttgttctgatttcacttctgttgaggtgataagatgttccaacagaaagcaaaacaaaggggggaagggtttggctaaaattccagtccttaacagcaaggaggtcaccagttgggaagcttgagccagccagtcacaccatacccatggtcaaaatcagacagaaataaatgcacccatgctcctgctagcttgctcatcaagctaattcagaactccatgccagagaatgggtcttcctgcatcaattagcaagataattctacatctatacatgaccacagggcaagctgatctagataactccccaaatgaggctctctcctgaggtgattctgtatttcaacaaggtgacaattgggggtgcctactcttgaaatgctaagtttagttgatatacatacgagtcctgccctttctgaatataaatggagtagatgtgaattgggggtgggtggggggggactcgaggagagaattcgggggtggggctgggaggagagaagggaggaaaaacttgggtcagagatataaaagagaataagaaaaaattttaaaaactagctaccacagtctctaatacatcctggtgacttttatttcttcttcctttttttgtttgtttgtttggttttacttttttgagacatttctctgtataggcctggctgtcctggaacttatactctgtagaccaggctgtccttgaactcacagagatccacttgcctctgcctcccaagtgttaggattaaaggtgtgtgtcatcgcagactggctctggtaacttttcaagaggagacattcaaagtctttcttctaagcatggtaggagtaggagataaagactattctgactgtgctagaaacatatcttacaaggaaaaaagacagcagttacctgtaacaggagaaacttttaccagctacacttcatacaaggggcaaatttctggaatttacaaagaattgcagaaaatactaagggaataaaaactgccagtcaacaaactggcaaataaacagaaaggacagtctgaaatataaaaacaaaaacaaaaaaagtggccattgaaacaagggctcagaccttagtaggccctgagacctcagcacaactgactccatgatagaagtgccattcgggtcataccctcagcacttaagacagcaccatctgccaaaactgaaacaaaggcctcatccatcaaactccatttagtcctgggaaagtctcaaaatacactatttcgtttctccagttctgcttctgggtctcgttaactgaagtatgtcaatccacaacatggtttttgtgcttaaaagatcatcctgaaaaaggctcagtgctacactgggatcctgagcacccatttgtgtacccagccgggtaataaaaacttaaacccacgtctgagcagtctcctctggtgaatatcccacagagccataaatattttttattaaaaagtgttcaatatccctagccatcaggcaaatgctgagataccatctaaccccaggagggctaccatcagtaaatctaacaaatgctgaaaatgatatagacagaaagaaacccatactcactgttggtaatggtgcaaactaatacagacactgtgggattgagtttggatagtcctcaaaaagttacaaaaagaagcctgacgtggtggtacacgcctttaatctgagcactcagtaggtagatctctctgagttgaaggccagcctggtctataaagctgaacaggttccaaaagagccagagagaccctgtcttaaaaaaaataaaaataggcctactgtatgattccattattttactcctcactatagccagagaactctggaccttaccagagagacatttcccacatttactattgctttattcgctagagcaaagaattagaatcaactttcctgcccatcaacatatgaatggataatgacaatgtgatacacaaataaaaatggactactattcagctctaaatgaaaatatgattacgccaggcaatgatggtgcacaatttaaccctagcactcaggaggcagaagcaggcagatctctaagttcaaggccagcctagtctatgtgaattccaggacagcaaacccaccacccctactaccccaacacaaacagccaaaaaaaaaaaaaaaaaaaaagcaaaagcaaagtgattgcaacatttgcagaaaaatagatcaatccagaatgtataatattaagtgaggccacatgaccgcagaaaaaggtgcatgctcttcatatgcagaatacagtcaataatatatgtgtataaacaaatgtataagtggaggcagtacaacatacaggaaagaagaaagcctaagtcttagaggatgcggaaggactgcaagtaggaaatgaattgaaagctaactgtctctagttccaactgacagggattttttttttttaagtttgagtagtggatatgtgcataaaaatgcattcaagagttaaatataaatccagtgtgaggctctatagcttctgttccaactagctattcaaattgtaaagaagttcactgacttgtacagtctttgggtctgttttgttttgttttgtttttagagggggtatttatttgcaatgctcttttataataaaaaaaattgtttttaatttaaaagcaatttaaaaaaagaaccactgagtctagactcagtgtatgtgaatcctaagaaaaacatccagtagactgggctctggtcacttaactccgtgtgtgtgtgtgtgtgtgtgtgtgtgtgtgtgtgtgtgtgtgtgtgtgtgtgtgtgttgtattctttcgtgtgaatgcatgtttgtttgtttttttttaaagagcattttttgggatgatgtcagttagcaaaatgaacaaagatgtgcaggtgaaagcactgactaaccaaaagttaatagaaatctaaattacttgagtgtggctggaaggatgagatgaaggtgcactatacagaggtaattaaaggaaaaggcctggaacacggtcctgtggatgacttggtagctgaaatcactccaaaaggcagagccctggtacctgacagtgtaaaggaggaactcctacagagaacagaatatcccttgttcaacataccaggtaatgtaagggtggactagaatgtgctgttctgtggatttatttctgaaagtaaaacttgctgtaattagaaattgatttcccaaaataaagtcttgttttttgtatgatagaatacagttttcagtttttaaaaaaaaaaaaaaagcatattttggagctggacaaatggctcagtgattaagagtatttgctgctcttgcataggtcctgggttcagttcccagcacccatactggcagtttacaactgccttttaattccacttccaggaaatctgatgccctctcttgacccctgtgggtagctatacttagggtaaacaaactcatgtagacactcacacatgcatgtaaataaaaatctaaaatgaaaaaaaactgagattatgacatcaatttaatcattacaagtaatatctatatatgtgtgtgtgtgtgtgtgtgtatacacacacacactaatgagttagaataaaaatggctcaaaataacagaaaacaaagttaattaaattttaatgcatattggtgatagaatccaaataaaaatactctattttcatagttaaaagtttcttaaatcagatcttctttcaaagtgctttcatgttttaattagagaatcactttattcaaagaatcattttatttacagttacaacttttgttttgtttttaaacccactcgatgtgtgtgttcttcatattggtattaaatacctgaaggagttgggatcttatgaatacagccaggacaacaatggagagagtcatgaacaaagacatcacagtccacacaaaaaacattttggcacactgtgcaaacatagacctgcaatggaaaggagaaaggcagataaacaaaattagtttccaaaagttaagaactgcatagccaaaagacaattcagttgccttgctccctatattcttcaatgtttccctaccctcctacacaccttattaatcccaatgtgttaaatctaacacaatttcctcaaacctcacacattttttccctcttcagccagccctgtggaataaggaatgcctcttagagaacggcctttcaattgcagtatatggcaaacagagctgggagggtaagtacgcacttataattctagcacttggaaagtggaggcaggaggatcacaaattcaaagtcatcctaggccatatatcaagttccagaccagcctgggctacaagactatgggaggagtggaggggagcaaaaacccaaatacaagagtatgtcaaatgatacacataaagaatataagaattaaaaaaaaatacattatttaatcagtattacatatatgggttaatattctagagcaataatatacagattttaaagtgactatatttcaaatgtgtaaaaatgtattctttaaaactgacaaatggagcctgctggtaacacgaaagctagtactcaggaaactagctggaagcttcctccctgaagactagctctgacggaaccagaaggatccattcacgcttccaaggaggaagcaaccaacagtcctacccagctataacaccacaatgaccagcatggcaggacaccctaagggcataatagtggctcacatattttagtggtaatcaacagctctctaattggatttaaagtccagtcaacaggaaggaaatcaaaatactagaaacctagccaactagtttactaaagcttataaagtcctgtatcttggagtagaaactatctccagcacttcactaaaccagaaaaaccactaacttcattctaaatattggtccttatactcacaaaaagtagtcgtcatctctaatcaaggaaacttctcttttcaaaagatggagaccattatagaaaacgacaaccaatcaaaatgcagagtcctggtcccagctgacacatttacaatacaactcctgcacctgaggctcagggatcatagattgtaaaagccagagaaattaggagtgtgtcgtgagatcgtgtctcccaagaatgttaaagacaaccatcgagcctgattttctgactgcctaaacatgaacaaggacaacaaacatgctaacatggttttggggaagcccacagggcctcagccacactgacagtgggagaaatagccttcccaacaggttacccaatatcaatggtcaaacctgaaaatacatagcaatgcacagagcaggctttgcttgtgtatttaggtacagatggacagacgggtggttgggtgaataacgagctcaaaggataaagcactttaccgtgcaaacatgaaattttgttttttggttttttttttttctttttgagatagggtttttctgtgtagccctggctatcccggaactcactctgtagaccaggctggcctcgaactcagagatccacctgcctctgcctcccgagtgctgggattaaaggcgtgcaccaccacacccaactaatactatatttttaatacttctaaactaaatgcaatgttgcttgaaaatccgaaaagtatttaaaatctctcagtagtaaaataagaatgagaatgacaaaactatttaaattattttgttcccattttacctctaccttactgtctttatagggaacaaacttcttatggtgtcactatttcagtatttcttgtgtattaatgttgaaaaagccaataaacttacatgttggtctttcaattccccctgacatccataacaaaacctgaaaaagaaagtttgagaatcatttttctagttttcactcattaaaataatttaataattatatgtgacttttagggagagtcttagttttggatttttggggtcttttttcatctttcaatatgagttaaaatattcttttttttctttttccaattttttattaggtattttcttcatttacatttcaaatgctaacctgaaagtcccctataccctctccgccccctgctcacttacccacccacttccacttcttggccctggtgtccccctgtactggggcatataaagtttgcaagaccaaggggcctctcttcccaatgatggccgactagaccatcttctgctacatatgcagctagagacatgagctctgggggtactggttagttcatattgttgttccacctatagggttgcagatccttcagctccttgggtgctttctctagctcctccattgggggccctgtgatccatccattagctgactgtgagcatccacttctgtgtttgctaggccccagcatagcctcactagagacagctatatcaaggtcctttcagcaaaatcttgctggcatatgcaatagtgtctgcatttggtggctgattatgggatgaatccccaggtgcagcagtctctggatggtccatcctttcatctcagctccaaagtttgtctctgtaactccttccatgggtgctttgttcccaattctaagaaggggcgaagtgtccacacttcggtctttgttcttcttgagtttcatgtgttttgcaaattgtatcttgggtattctaagtttctgggctaatatccacttatcacatgagtacatatcatttgagttcttttgtgattgggttacctcactcaggatgataccctccagatacatccatttgcttaggaatttcataaattcattgtttttaataactgagtagtactccattgtgtagatgtaccacattttctgtatccatttctctgttgaggaacatctgggttctttccagcttctggctattataaataaggctgctatgaacatagtggagcatgtgtccttcttaccggttgggacatcttctggatatatgcgcaggagagtattgctggatcctccagttgtactatgtccaattttctgaggaaccgccagactgatttccagagtggttgtacaagcttgcaatcccaccaacaatggaagagtgttcctctttctccacatcctcaccagcatctgctgtcacctgaatttttgatcttagccattctgactggtgtgagatggaatctcagagttgttttgatttgcagttccctgatgattaaggatgttgaacattttttcaggtgcttctcagccattcgatattcatcagttgagaattctttgtttagctctgtgccccattttttaatgaagttattttctggagtccaccttcttgagttctttatatatattggatattagtcccctatctgattacagtattattattattattattattattattattattgcctagtctgttgtcctttgcagtatacacaataaccctgtttataattcctaagaacaagaaaaattatacaatatgtcccaggtcatcacatagcccaaaatttagttcttattttcattatacacgtgctttctgaactagaactctatgagaatttgatgcctacagaaaactatcagagctgggcggtggtggcgcatgcctttaatcccagcactcgggaggcagaggcaggcggatttctaagtttgaggccagcctggtctacaaagtgagttccaggacagccagggctacacagagaaaccctgtctcggaaaaaaaaaaaaagaaaactatctgaaaactatctttcagttatcccaaatacggtatgtaccctagatgagtacaccaaggaatttgttacatataagggatgcctgtggcttttttttttcaggacgggctggtatataccttagtagtacaatacaagcttagcatgtataaagccctaaaagcaataacatcatccctgtccatgggtccttagaatttattacaaaatagcaatcttagctgggtggtggtaacacatacctctattcctggcagaggcacgcagatctctaagcttaaggccagtctgatctatagagcatgctctaggacagctggggctacacagaaaaaccctgtctcagaaaaacacacaaacaaaaaaacaaaaattccccagcaatctttttattctcttcacctcatttctacctcccctgaagtatctttaacattttttttaaaagatagctcagcagttaaaagcacatgctgttattcccatcacatgggtcacaacctccaggtccaaagcctctagcctctaccagcatctatactcacattcatgtcaacacataggggaaaataacaaaatcatctttaaaaatgtagctgacactcttgtgagcgtgcagttttattcataagtactagccatgaaccttcaactatgcaagaaattgtcttttaaccctctagatccaataatatgtatctgtatatagttcctttttttttcttgctttttttttttttttgagacagagattctctgtgtagccttggctatcctggaacttacttgatagaccagggtggacttgaactcacagacagcagcctgccatgtggcaccacatgtggtatttctatataattaaatcatcaacttggacaaaacagcattcactatttagtttgttccacataaaatgtttcagctctgacaagtatgtgcatgtgtgtggtatgagtgtgtgatggtgcatgtgcaggtacgtgtggaggccatggccattaccctgatgtcttttttaattactccattttatttttgttttgttttacccaattcaaggttatttttaagataatgtttcttactgaacctggagctcattaactagctattctagttggccaacaagcccagggtgcccacccccagggtgccccccccccccgtgtgcccacccccagggtgcccaccccccagtgtgcccacccccagggtacacactgataggcccagccttttacctgagtgctggggatctaaactgcagacctactgtccacacacacagcaatatccaacacccatctcctcagcctctaattttcctttggtgataattaattccaagcgtactttcctacataactagcacaatttagctctaatctttccatgaatagcctagacagcctctaaatacatttaactctcaggaaatgtattcttttcatcccctcaagacatctttcttagagaattctaactttccaaaacaagattgactactctccctgaaacagacgtcatcatcatctccactcacccttgtcctaagcttcctttggcttgttcgcagttagaggcagatcctccgatcccatgtccttctccttctcagtcctacttcctctagaacttcccctaaagcatctctattttgctaagcaatttttataacatttcatttatctatctgtgcgtgtatgtgtgtgagcatttgtgtgctgtggtgtgcatttagaacacaggacatcttgtggagtcaattccctccttctatcatgggggtccttgggattcaactcagttcatcgggcttggtggcaggtgcctttatgtactaggccaggcctcccccggaagagtctttttgagacctcacaagtctcaaaacatctttatgtttttataaacacaaagaacttgcctacctggggatataatttaagtcagttatacttttccctaaaagatttgagggtgaatgctctcattagcacctggtgtggctagtagtgtaaatgttttgctgcatattttgaactttcacaattgtgtagaaaattatgttttttaaaaggaaaatacttccttgaactactcaatgatttcctaccctacaatgtatctttcttttcacattatcctaacagtgggccttttatataaactcatgtttcacctttaactctcctatttacacctcattaacaccttttaatcctgccatctttcttcaactccaaatccttcaaatccatctactagacttttcattaagttcacacttacatgaaacctgaaacaatgcaactttagttttgatttgccagtttgaaccaactataaaaaaaagttcataccatctagtatcagtaaagtttgggcaaataatatataaagcctctttaaaggacaaatttacaacatctaccaaaactcatataacttctgactcaacaattctacctgagaatttgtcctgcatactcttgtacaactatttggagatacagacatgggcattacttgttaacagcaaagagacaatcttaaatagttaatacaaggcaattggttatgtaagtcatagaatataatccaagaaaaatgatgtaatttgagaagcaagactgatctagacatgcttatttgaaattacttcttttgcatatgtagtgtaggtgtcgcatacatgtataagccagaggttggtacagggtgccttcctcaatcctctaccttgttttaagagccaaggtctttcactgaacctggagctcactgaatgactaggctagctggcctactgaatccctggaattctcctgtctctacctcacaacactgaaattacaaaaatatgaggccacatccagcattctttatgtgggcgctgggtatccaaactcaagtcttcactcttgcataataagtatccttacccactgagccatctcttcatctgtatattaaatttgttctacactatctttaagtgtgaaaagtgatgcattattatatatgaaaaatataattattttgtgatcaaaagttctaaaatgctgatactttttgaataaaaagtcatttcctaaaaaaaccaaccgagaccacttccacttcagcttttactactggaaatgtcagtaagaaaataaccacaggttcttgattatgttcagctagcctcttctctccagtaatattcaagaaggccagcgttaggtattcataaattttgggggtggttgttaaactactgactgctgaaaactggccattggcagggccattttattaaaggactcagaaaatgtaggcatagaatctcctagagctggaagtgcaggcagctgcataggtgctaggaagccaacctgggttctaagagcagtgcacactcctaaccattgagccacctttctagcccccaccccagcttccattccccaccaaaccaatataatattactcttaacttactctttattactattattctttattatatatttctcttaactataaatatgtgagtttagggaaataaacagattgctagacacagtgttctacatctcattttctatattaaggagttgtttcaatcattagcttaccattgtgacatataaattaatcaaaattcatatacctttctcctttatattcttctagggaaatttcttgaaaagcatccaaaggaaataaatgatggtaagatcttgccaaatgaggtgcagacaccaaagtaagacctaatgcagaaagacagagacattaacaagcctgacctcataaagacaaaggctaaaaagtcaagagatatacttagaaaaaatgctttcaagtgttttcatttctctttttccagtgatggggatccaatctagggcctcacacacactagaaaagctgccactatactacatagccagcactcaaggatttttaggaccctgagtactttttagctgtagccatgaaaagatatttcaggatagaattcaatctgtcactaaatacatgacccaaaaagtgcctattaaaattatcatagtgtttttaaagaaaacatttaccaaagagagaatcaggaaagttctgtgatgctatgcttatttttagaaattaattactagggcttgaatgaaaaaagcaatctatttttctttatacaaattaaatatataataagcaagatccaacacttatgtttaattcggcagctacataattacgaatttatttaatgctaatttacttagtaaggactaatagggttcttaccacatattttacattcaacaggaagctcgcagtactttgctcggcactgtgggcagaagtagcctcccagtgtaagccctggctcagtgctgttgttatccaaatgcctatgggtggaaaagttatttttaaaagatgaaaagagctaaagcaagtatgttattcaaacccagcagtcaggaggcagaggcaggtggatgtctgtgagttcaagcccagcctggtctaatagtgagttcaaggccagccaggactacacagtagtaccctgtctcaaaagataaaatagataaaattttattggaaaacatgtatgtcttttcgctcactaatgctgttcttttttctgtcttcacttttaaagtttctcttagagttatttttttctttcttgatgactaatctgttagttccatccagtctgttttttcttttcttttctaagatttagtttcgttttaattctgtgtatgtgtgtgtgtgtatgactgggtatgtgtacatgagtacaggtgtgctcagagagcagaggtgtcagatcccctgaaggcggagtcacaggcagttgtgagctgcccggggtaggtgctaagagccagactctggttctgaggaggacattatatgagcttaaccactgaactatcccttcagccctccagtgcacttttcatctctgacgttatattcttcatttctagaagcttcatttgagttctttttatacagtttcaacttctccttcacttaagagactagagagtgtatttacattggctattttaatactgtcgtctattaattctagcaagtgttttctggctgtttccattctgtagtttttctgttattctcactctctcatattttctcactaccacccatctttcttcttcctcctctctcttcccagtgtttctatataactcaagccagccttaaatttgccgtgaccctcctttctcgtgcccaagtgctggcctgtggtgatgtacagcagcagcacagctggcagccagatacttctacatcctgtgagagattgtaatctgtgttgttctgggtactaatttttttttcctccataaatatttagagctttattttagaatgaagtaacttaggtacttactgatctattcaaaaaaatgtttaagtatcattagcctagcctagtagctactaatctaaccaagtctcattattgtgggctctctaaaatgtcttttgtgcaactgagaattgaacctcagctttatgttaagtgctttgccacttagctctgaccacagccctcctttcccttttattctgagaggagtcttactatgttactcaagcacccaccaaggtaaactttcttcatgtttgaactttctattccatttttttaatcattagaatatatatgtattatatgaataatatgtaaacatgtatacataatgtgtattatatacatatgtatcttatacatatacatctacacatatctacattttaaatgcagatctaagtatatacatctactcatgtctctattttcatttcatttatttatggcttttacaaatatattctatagctcagagtgacctcaaactcaaagctatcaccttgccttagcctccagaatcctagaaatgcagatgtgagccagcatgcctgcccccgcctttaatttagatgatgggtaacactacgcacatgtaccttgctattttatttagtaatatatcttgatgatcacagcatatgcatacataaagagggccatttcttttcatggctatgcagatggtactagtttataaaaatcattataaattaagaccttctaacttagaggaataaattttaagtgttaaaatgttattactgggagctggagagatggctcagtagttaacaacactggctgctcttacagaggatctgggttcaattcccagcatctacatgacagctcacaagtgtctataactcctgctccagggtatctgacaccctcatacagacataatcaaatcaccaatgtacataacatttaaaaaaaaagttatcactgacaattgctctttacttacgccatgctgaaggatggttttgcatcctgatcagacaaagaagcaatggtatgctgagggaatccttaataggttaaaaaaaaattacagcattaatttcttttataagcaaaaaccagaattttatgaataagaatcttaagatattcttatcagaaagtcaacaaagttgtataaaagctctttcctgcctttgaggtcgatatgtgcctatcatagtataatgaaactctaatgccaaggtataagaaaaagcagaggaaaaggagggatgatctttctatatacaacctcacactccgaaatttatatctttaatttaataaaccacattttaaaaaaatagttcacgttttatatagctcctaatacaaccaaatatgtattaaatgatacagtatctctttaagcacatataaaagaaaaccaaaatccctttaagtgctaggcatggtgactcacaccttcaattgcaacacttgggaggcagaggcaggcggatctcagtgagttcgaggccagcctggtctacaaagtgagaccttgtctcaaaaaaagaagattatttaaaataatcatttttatgaccaataattttctactccttgaaaaaaaaatcagagtaatttggcaaactttgctgaaactttctgtttttgcagtttgtatgacatactttgattgaacaataaagattttgtggcttatttaagaaatttcttgggctgacaagatggctcaactggtaagagcactgactgctcttctgaaggtccttagttcaaatcccagcaatcatcccatggtggctcacaaccacctgtaatgaaatctgacactctcttctggtgcgtctgaagacggctacagtgtacttatatataataataagtaaatctttgggcaagcagggactgagcaagcaggttgaccagagcgggcagggttgactggagtgagcagaggtcctaaaaattcaattcccaacaaccacatgaagccttacaactatctgtacagctacagtgtactcatatacataaaaataaattgataaataaatcttaaaaagaaatttcttaccacaagtatttttaattatataaagtatctttttatctttctaatttaacaagaccagaagtgttatcaacaaacaggataggtggctttaatttctttttataaacatgtttcaatatgtatttttattataataaattcaagtaggaaaacaattcttaaatgtgaaaatggtaacttgcacaaatgaaagcagaatgcctgacttgaagcaaaggtgcacagtaaagcaacacgggagagacacatacccatgcgaatgagtgagcactcggagcttgagctggcaggaggggggctcacatgatgtgccaacaactccttgtaatgggtttcatctaagataacatggtatgtgcctaacaggcaaaggcaaagcacagcaggttaaagacaagcgcttctgtgtaaaacctaccaaagtttctacagatgaaaatatataatttcataaccattttaattatcacttaaaataatttaaatctctcaatgtctctagatataatagtaacaaaaaaattaaagccaatctttacaaagtattacatagagtgagattgctacctttttgaaagttttaactctaaaacactgacctattgagaactccttgcattttaaatggttgcttagaacactcaatgatatgtttaagaatatagctatatttcttacacagtaattataattattgaagatagcagatatataccaccagtttcacgagcaagtacagtacaaactcgaacctccgcagataatccaataacagacactctaattttagctgtcttcagggtcttcataagatccaaaaaacatgaaagatttcaggaggaaaaaaaaaattaatgaataaccttgaaaattactgttctgaaagctagtgctatagagtctagcctgagtcttgatcctaccttgatgagatcgtaaatattagatggatcacaggtggtgaggctgctgaagatgatgagcacttctctacttgtatgtccaggcatgtgtctgcaaaggtaaagatacatcccagcacaggggaacgaacgccagggccaagaagtgggagtgagtgggtagtggagcagggcagggggagggtatagggaactttcagaatagcatttgaaatgtaaatgaagaaaatatctaataaaaaggaaaaacagaaagaaaaaaaaagatacattccaataggtcaaataaattacactagctaagaatttatccaaatggagagtaaacatggtttattcagttaagctacaaagagaggtaataaataaaagttacatccaactcatgatgattaaattctaaatttcaatctctctcaaaaaggtgggtggatgaatgggtagatagatagatagatttttagcccaggttgacctcaaactcatgagcctcctgccttagtctctgcagtactagaattactaacatgcaatatatgccttgacattcaattaattctcaattaaattttttttcttagttctatgtactgctgtggattttcttttatctttctaaactatactttaactgataaaatataaattaaagataaccaacaccacggggcagtggtagagtatgcttcccagaacttgggaatcagaggcagacagatctcaagttcaaggccagcctcatctacagagtaagttctaggacagacaaggattacaggcagaaacattgtttcaaaaagccaaaacaaaacaaacgaacaaacaaaaaacaccaaaataagcatcataaataacattttagggtttttttctatttaactcttttgttataacaggcttcatagagacccatgttgacatactttcaatacaatttacagaaaaaaatctgaaaaaataataatataaatggttatggttgcgcatgcctgtaatctcaacatttgggaagtagagctagaagagtcaggagtcaagtcatcattggctacattggagggcagcctgggcaacatgggaaaatagtgacatgaagaaaagaaggaaggagaaagggaagatgggggaatgaggggggagggagggagggagagagagagagagagagagaaggaaggaaggaaggaaggaaggaaggaaggaaggaaggaaggaaggaaggaaggaaggaaggaaagatggaaagaaaaaaggacagaaggaaagaagggaggaagggagaaagggagggaaggagggaagaagggagggaggaaggaaatggggcctggagcaatggctcagcagctaagggcccacactgttcttgcagaggccctgagttcaagtctcagcacccgttgttgggcagttcctaactgcctgtatagctccaagggatcagagactctggcctgatgtattcacgtatacttacatgtatatacacacacagagacacataattaaaaataaatacattttaaattactgggagctggagagatggctcagcagttaagagcactgacttttcttctggaggtcctgagttcaattcccagcaaccacatggtggctcacaaccatccgtaatgagatctgatgccctcttctggggtgtctgaagacagctacagtgtacttacacataaaaaataaataaatctttaaaagaaaattactaactttagggtctgcatagccatgcttaaggaattatagagcgatggttctccatggcaggtcatatctacagctttcttcaaagatgttatatgtttccttgggtttcctaaagtaaagtgaaatatcttttagtaaaacactatataaaaatatggaaaagcatattgtttccaaactgtacaaatctatgattttaaagaacagaatgccttcaatttctgcttttatcagtttgcatgtttaataagaagtctccttttcttttgtttggctcatttgtcttgttgatacagaatctccttatatagctctggctgtcctggaactcaaaactcagagatctgcctgcctctgcctcctgatctcagagattaaagatgtgcaacactactgaggctcaagtctcatttcgtactggaaattacaattttttgatagatataaaatctatatccattaatatacacttaaaatgaatattattctagagtgagcaatctttacacttatcaagatcagtattctcatattttagcttctctgaaacaggaagattacaagttctaggccaacccgagctacatagtgtcaaaaaccaaaattaacagtacaaaaagttcccagaaagattactgatataaaaaattaatttttatgtaactgagcaaagataaaagcagcgaggtatatattttattaataaatattcataaaaatgacacaatcccgtatttttcttggggaaagcaaacaagaactcacaaagatctaaacaggagggagggttcagcaaagtgcagctgctacctcatcaacatctgagaagactggaagactatctgacggcctatgcctgccgatgctcctagaacagctggcagacatcatcgtaacactgctataaacaagtcatgagtaacttctcggctttcccaccttctgttttgctttgctgatagactggatatccctacatagctcagaacacctcaaactcactagaccagggtggccgggaacttttaattctcctgcctcaatactgctgggaatacaggtttgcattgcacctggtttatttgttaaatagtttctggtcttttctggcatgaactgtctacttccattttctaacaaatccaaacaagtgaaagacacagacctctgacctctggtgggagtaccaacacccaaatgtcagtctcctggttctctgtccactttctccactagcatcccacacaaagtacttaaaatccactgtgtgctgggcaccggggaaatgcacactacctcagtgtcagggtggcttacacaatggtctgactgtaaggacagaagctgtccaagaggattgcagaatccctaaaggacagttcatcttttcaacatatgaattcactgacatctcgacaagaaatttgatgacaagagggaaagagaagagagttgatcttctcttcttttttggaggaactcaccttcctcaatctcatgataatcctagtcagtttgtggcactgactttcctccattctattggtctgctatgggcacagcaagttcagctccctggcctcacagaccttgagtaaggtcaagaggaattctagtgaatttataatgaagctatggactatgctggccataaaaacttgaggctattgaaaacatcatttttcttgagaaggaagttggataaaaccaagatccctagaaacagctacctaagaaatcagcctacctctaaatatatgccaattccttttttgcagtgaaattatttcaagatgttttatatttatgtcttttggtttttttcacatatatggctgttttggctgcatgtttaactatgcaccatgtgtttgcctggtgtccctacagaccagaaggcactatcatatctgctggaaatggggttgaagatggttataggctggcaatatgggtgatagcaattgcactcagaaccagtgctcttaactactaagccatctctccagcccctgcagagttttagtattggtgatcaaacccagggctttattaagctatatctctaacctttcctaagacttcttgggggttgtgatagtttgaatgcaattggcccccacaggcccacagggagtggcactgttaagaggagtggccttgttggagtaggtgtggccttgttggaggaagtgtgtcactgtggcagtggggtttgaggtcttctctatgctcaagccatactcagtgggacagtctcctgctgcctgcagttcaagatgtagaactgttggctccatctctagcaccacctcagcctgtgagctgccatgcttcctaccatgaagatacagaaactaagccagcaccaataaatgttgttctttagaagagttattgtggtcacaatgtctcttcacagcaagaaaaccccaactactgttaactaatttcttggcatacttttggcaaatttatatttgattccttatggccagagtcaagaactattagtgaacaaagtcatctcccttatgtgtattaacaagattgagaacctcatttaaggaataggctattttacaaaaagaaagtgtgatgcaatttgaaacagcatacataacaaagacaaaagaaactgagattaatgttgtttactttatgtattgactttatgcctactgactgttttccctgcatgtatgcagtcacagaatggtgttagatgccctggacctggagtaacagtcaggagcccctatgtgagtgctgagaaccaaactcatgtcttctgcaagaacaaatgctctgactcattcataaatagcccaattcaacttttatactttctgctttttaaattagacactttttaatttgaaaattaaattttgtagttagttaccaattgggctagcttaatattttcaggatgaagaatgtgtatttaaataagcatatttacttccagtacatctactacttcagacctcaatttgaaacaattagtagtagattccaagagttcaataggaagagattatgttgtttcacctaaaatgcacataggaaggttttacagagttagataagcaaagtccttgagtcttgtaaagacattttatgcatacctgagagttcagtcagtttttcagctcttttactcttagttacaattattccaatctcaaagtaaaaacaaaaatgattattttaatataacaaattatttcctcttgataaaaatacacggaatatcaattagtaactgcaaaacaaaataatgaacatacatgaaacttttctcatagtgtttttgaaaaatctagctataaactgtctatacgttaataagacatactacatgtttaacatttagagttattttgctcttcaatattaagtataccaaaaataggtatataatctggttcccttaatacttcaaagaatatatgcctcattttaaaagaaaaataaactatatttgacagcaacataggaatctagttctgaattcatttgtctacatacctgactgatagggttttgatcaaaatattcttctacaaagtattccagcaactgttgaaataaaattaaaaggcagcataataataaaattaaaaggcaaaacagcaatagcagacaccacgccagtgccctgtagaacctatttatggagcaggacttctcatgactttgggggactcaagggtgtgagctgagacagtgtctcactatgcatccctggctagcttcacctcactcctagagcagaccgacactaaacttggcaagatgttcctcttgctgcctcctgggcactggattgtaggtatgtaggtaactccagctctctcagattgtcataactgtaaacacgttgtgaaaatgttcaattgtaaaagcatgtggagtgggtgataagacagacacagccccgtttaaagatgagccgcatcaaacacagcaggcacctgctaccctggctacaggggaatctgaaacaggagagtctcctgaggcaaggagtctaaagtcagctgaggaaacacagcaagatctcatcgtgaaattcaaaaccaaaaaaattagtggatccatttggagttgtctaaaacaacataaataagaaaaatatccagtgaggagagaggtgacagcagaatcaaaaacaggcatcaaacaaggcactgaggcagatgatctcttgagtctctggtctgcagagctagttctgagacagcaaggactaaacagaaactttgtcttgaaaaaactaaataactaaataaataaataagttggaatattattagtatgttgttaaggtgaaaaaacaaattcaaagtcaaaggagaatgaacagtcagttggggagaggtgagtaactagcctcagaacagcagttctcaacctgtgggacacaactttttgggggcctgaatgatcttctcacaggggtcgcctaagaccattagagcaaaatgacagttatgaagtgacaatgaagtaatgttatggttggggtcaccacaacacgaggaactgtattaaaagttcacagcattaggaaggttgagaaccactgatttagagaaataataaaccaagacaactactttttcaagttctttgttttgttgtagctcaggctcattttagacctcattttgtagaccaggcacacttgaggtcagaggaccactttctagaggtaatgggttttctcctttcaccattttttctttttagacctatttattttatttcatgtatatgggtatcttgcctgcatgtatatctgtgcatatacgtgcctgatgcttaggtgttggactttctataacaggagttcctgacaattaggaagttccatatgggtgctggaaattgagccagggttgcctggaagaaaaactagtgaaagccaggttgtcagtcttgcacagcaaaccttaaagcacggagccatcctgtcagcccatttgcttgtttgtttgtttgtttgtttgtttgtttgaattattggaggattaattcaacacatatttatagactagttcttggaataaaaagtcactttagaaatgatctggtgtaaagtctgtggacagtgcctccagcccagcataagaaaaagtgaggcgtgctcaaacccctggaatctcagagcaggactggggctgctcccccaaccccgccccggggcctctaatgcctgctctggaacacgtaaccacgacccctagctgaggtgaccacaggcacccagtcacacagcacggcacctagaacacctctccatgctagaggcacctcagcatcctttgccttcagccaatgagatgccccttcctggagactctcaccaccatccccaaaattatacaatccctggttcacccagaacaaagcctatgcagccaatccacccccaatgaaacaccatgaacaagcaagccgtttcacggagcagctgcaccacagggaagaacgtcgcccacactaagactcccacccctctgcactcagcactcagcactctgcactctgcactcactcccaaccagcctggaatcttgcttgtcccaggccctgatttcccctcctagccttgctctgatgccccaaagggagacccagattccggactccccgccccagactttgcccaaccctccttgagctgatttatctgtgtatcagctgtgtccagatacaaccagcagagaggcagaacacgggaccaacatttctactcagttaacatttgttactaattggaaaaaaaagcaaaacaaaatttcctgtactcttaaactgttatataatatatatttttacttatacatatgtatataccctttccctacatttagcacaaacttagggagtctactatacctttaaagtgcaagtcagtctattgggctttaaatcctgatcttccattgttctcgatccatccaccaccacatacaggtggcgcatctaccaaaaacaaggagaaatgtccaagtacatttttgaggaagaagcaaaattattacttactattcaaatattctaggcataagttttaaatctattcgtttaaaaggttgttgtttcactgtttattctgtcaagtcagaatatttctctgatccaaactagttctgcacaaactaacagaaaaattcctaacataccattccaagtcggacttgtccatggtgctcaaacactctgttaaaattataaaaaacagttaattgaacatcacagctaccaaaactcaataaaacaatctgtgtctttttcattaattattaacttttgaaatacataaaactaaaggcatcatgggtagtctctggagaccacttttcttgggggcaagggctacttgctagctctttacccctagtcagacaattgtggtaagcttccctaagcacacagttaaaaagaaatatgaaggacggtcacagagggacagaaaggcttcgagaacctcttttccttttgtaactctttctcaaaagcagctcataccttttcctctttgccttgaagagaatatcttctattgtagctttaagtgatccagtttcatcttctttaagaatttccctgaaagcaatatttattagtttgaaataagctaaaaatactaatccaataaaaagtaaaacatacaaagatctgtatatgtatgttcgcagcagcacaatccataataacaaaaaactggaagttgatgaaaacatctcaaatgctgaatgaatgcacaaaatgtagcataagagtatagagatattctccagcaattacaaaggagcacattcaacatgaaggagctgtgaaatttacatcaaatgggcaggaaaggtgatctgtaggtcatgacagtgtgtacaggtggtggggacggaatgagtataaaggcacttactgccctcatttactgttctaaaagtagtttatggcaagagttatacaaaacagtaaatatttttcaaaagaatttcactgggttgtcaactgagatatattgaattttaacacacatgaaacacactttaataaaactgaagttaaagagacagtatctacagcacggccaattacatctaacttaccaggttctctcatagcctccttcccaccgcttggttctctcaggttcttcatccatggtgcttataataatatatatgcttattcaactctgtaaaaaaaaaaaattagatcaccaattaacctaattacttaacagttagggacaaagtttaaaatatcagaatgcaaggtcattttattcttgcagtgtattcagtaaatattctgtgaaaatacaaaattctcagttgggcagtggtggcacaagccagcatggtctacagagcgagctctagagtgagctccagagcaagttccgggacagccaaggctacacacaaagtaaccctctctcaaagaaaaaaaaagtcagaagattagagactagtcctaaggggctttttatgaaacctgctacaatataacgttattaattaaattctgtatatttcccacggagttaagaagtctctcatcatttgcctcagaaaacttgatcgtttgtctttaaaaggtaaaaatacctcagactggcaaatgcttactcagcatcctatcctccatgtgcaagaatagctgtcagcccagacagttcctatctgaaaccacagacagggaactaaggccagaacgttatttcctgagcctctcacgctgatgcacccttccctcttcaagcccagactgggctacacaatgagactcaagcccctcaaacaccactgtgaacataaaagtaaagttctgcctggacatggtggaactgatgggaggtgacgcggaaataaagataaaagacaggtatccgtagaagcaggactggcttttttactcagaaacaggagggcagaggcaggtggatctcgagcccagtctggtctactaacagagtctaggacaaccagggctctgttacacagagaaactctgtctcgaaaaccaaaaaagtaaaaaaattaaaaggatgagcccttagaagagggaacaaaatacccatgggaggagttaaagagacaaagttcggagcagagactgaaggaatgaccatccagaaactgccccacctggggatccatcccatatagagtcaccaaaccaagatactattgcagatgccaacaagagcttgctgacaggagcctgatatagctgcctcctgagaggctctgccagtgcctgccaaatacagaagtggatgctcacagccatccattggacagagcacagggtcctcaatgaaggagctagagaaagtacccaaggagctgaaggggtgtgcaagccccctaggaggaacaacaatatgaactaaccagtacccccagagctcccagggactaaaccaccaaccaaagagtacacatggtgggactcatggctctagctgcatatgtagcagaggatggcctagtttgtcatcaatgggaggagaggcccttggtcgtgtaaaggctctaagccccagtataggggaatgtcagggccaggaagcaggagtgggtgggttggtgaacaggggaaggggtaggagataggaggttttcggaggggaaaccaggaaaggggataacactggaactgtaaatttaaaaaaataataatttaaaaaaataacaaaactatgagcctggctgtggtggagcacacctttaatcccagcactcggaaggcagaagcaggcagatctctaaagttcaaggccaccctagtctacaaagtgagttccaggactgccaaaactacacagagaaaccgtctccaaattaattaattaattaattaaaaataaataaaatttctgttcaggatgggcatagtggaatacacctgtgatcccagcacacgtgtgtgcgtgtgcacacacagttcgcatattactttt

SEQ ID NO: 81 - DNA, 4439 bp, Rattus norvegicus
caagctggtacagccaccactctggaaataagtctgaaggttcctcagaaaattggacattgtattacttgaagacccagatataccactcctgggcatatacccaaaagatactccaacatataagaagacacatagtacactatattcatagcagccttatttatcatagtcagaagctgtaaagaacccagattgcccttcaacagtggaatggatacagaaaatatggtacatctaccccatggagaactactcagctatcaaaagtaataacttcattaaattcataggcaaatggatagaactagaaaataacatcccaagtgtggtaacctaattgcaataaaaaacacacacgttatattctcactgataagtggatgctagccccaaaggtcaaattacaaaggattacaaccacagaccacatgaagatcaagaagaaggatgaccaaagttcaggttctgcagtccttcttaaaaggggaacagaaatattcataggaggacaaatggaggcagagtttgaagcagagattgaaagaatgtcctttcagaggctgactcgcctgggaatccagtccttatatatacagcttcgaaagctagagaatattgacgagtccaagaagtgcatgatggcaggagcctgatatagctgtctcctgagaggctcagccagagtatgccatatacagaggctaatgcaaaccattgaacagagaacagggtaaccattggaggagttatagaaaggttttaaggtactgaagtggcttgaaaccccataagaacaacaataccatccaaccagatctccaagggactataccactacccaaagagtaaacagggacagacccatggctccagctgtgtatgtagcagaggatggcctttttgggcaccaatgggaggagagcccttggtactgccagttctgtacccccccaatgtaggagaaaatcatggcagagaggctggaagagagggttgttgaggaaggggagcacactaaagtaagaagtgtggagggatatgattgtgtcttatgcatgggaacctggaaaatggaatagcatttgaaatgtaaataataaatattcaattaaaaatacaataaaatagtttttaaaagagggaagttatttaaaatgtaggcagccagcttgtactggaagagcaaaaacccaagaaactcactaaaccagtataatttccagttcttttgtaaatacttgttcttatatgcacaggtaaattttattcttctttttacaacatatggagactcttccatagatgtacaatgggctaaaatggagttaataattgatagcaaggtgcctaagcctaagtagtacagcttcaatatatcctttaaacctaggagtcaaggtaaacatcagagaggacagtacagacatcctccagtgtccaagattcctctttgtagaatatgtctctcagacacaacagagaaaatagacacaggaactgttacagtatagttattcaaacaaatcagcataatagcacgattaggcacacaaaagaggccaggaaaaattctatatggttataccctagaagaagaaatacaccatatcagtggttgctaagacatggagaataaactgtttctgaagatgaaatcccgcattaattttccaatctcaaccacacacctcagcatacaagcccaactgaatggactcagtagattgactatatatgtgttatatgtgtgcatatataaatagaaaaatattaaagaggagatcataaatataagaaacggatggagggctttgaggggaagaagaaaggcagctaatgtactatgagcttctcaaaagtacctataatttaaataaattgttatgaaaagtttctgtatgatcactgtcacttttctgcatattgaaatcattctaaaagctaaattgtattagaatacagtttaaattatcctgaaattttatgtcctattatttctgagtttctgttcgggggtcatgaacttgggcgcacaaatgcagcagaatgttctttgtatgagttcaaattgctcaataaaataatccttgtctctgtgttacaatatttatttattcctatcagtagctagtttcacaagagactagagaatgttaatgattttttaattgcactataaatcttacctctcagcatttgctataaacagaacaggtggcaagggctggaatactaaaagttattcatgatgtcagactatacttggtttgaaggaataccttttcctgccttttggttttccaaagaaattctggaaaatagttgtaagaagtttgtggtaaaagaagacgacttgatcatattgacttaccccaagtcaggtaaggaccttcagtaagactgattctgaatcgtataaaggaggttagagctttgatatttatttgttttgtgcgagtagtggagtcctctatatatccaatgtgtaaagtggtttgtgggaatggagatttgtgtgtgttccactcagagaaagatttcacatatgacctatgtgaggagagttgatcagctgtggcaatagaacaatgagagtataccctgaatcagaatctcaaatgcatttatatctgtggtgaagagatagaaaatagggagagtgatgagaataaaaagaagaaagagcatcaagagaaaaaggactgtatatgaggttatgtggaggagaggaaagtgccatgtagactttccatggaccttgtccacgaactggcaactgaaaactcaagaaatcaaaaattgacaatatggtggtttggggaatggatgtttgcactgtggaagaagtacagaacttgggtaaatattagactgctgatattgaaatcacaatgacacagaaaatctaaaagcagtgggaatccaggaaaagaaagccagacaatatcaaacaaacacataaacacaaatgtaactgtgtgtggtaaatgtacatgagggaattaattcatcctaaaaagaaatattgtcatacattgcagcattgttgcatctcaatggctgtagcgcccacctcgaccagcaaggaagactcgacaccgttggattcttcttaacagcctttattgcaggaacacctcattgttgattcgaggaaccccggggaacaaaggcacttgccttaaatacaatacaaacagtggttgtaaaattgtcctctaaggattggtggagtatgaaatgccttattagcatgaatatcactctggccttgtaaatgccagataacgccaaagacacacgctttgtggtgtaccacaaatgaccactcgatgtcagtgccgtctttagccgctcccaacaatggcaatgaattaaaatcagaaacgtagtcttagaggacagatggtatgacttcatcactgtgaaatatctggaaaagtcaaattcactccaccagaatgtagaatgatggtgccccagggctggagcagataatccattggcagtttggtgtttactgtgtatagggtctcagttttgtaaaatgaagtcttgaaattaatgttgagtgaatacactttgcactcacacaatgtggatactgtgaacactactctatatgcttgaaagtgggcaacactttaaattttatgggtatatattctacttgaggcttttttttgcagtactgttcaaatgagtgactttttttcttttcattcaggaacgaactggctgatcgagattgtctgcttgattcagaccaagggagatcccaagtggatccaatctatgcccatctgggatcgctcaccctggatagagactggttcaggatatgataaattaaccaaaatggaaggaccacgactcatgacctcccatcttcccatgcatcttttctccaagtctctcttcagttccaaggccaaggtcagtgtccaatggctgagattttctttgactaatattgtgtgaacttattttaccctgacaagccttggagatcttacaaaagtatgaaggtgggattcttatgcattaggtgatgctgatctttcctttcttcagaataaattagactatcaggctgtggagcatcacacagagatcctgggcgctttaagaaagaacgtgaaatatcacactagaacattcagaaacatcatgtgtaggccaagcagggttcaaactttagcatatagtgcaatattactgtactcttttcatcaaagtcaatgatccagttataacatataccccaagctctgtgtggggaaatcactgaagacacagttgctcataggaaaagagcctgacaagcatcaatgttcaaaggttagttgtacacacagtgttatgctgtgtctagctaactattgagattagtagccacaggaatctgccatgaaacttaatgagaatgacaagta

SEQ ID NO: 82 - DNA, 479 bp, Rattus norvegicus
  misc_feature (1)..(479): where n may be a or g or c or t/u, unknown, or other
accacatggttntgatgtgagggtgttacancaaaagtgattcctaaaacacttctgaccatttgtgnntgttttcaaatgtattaatcattcttctctatattacacacacacacacatatacacacacacacacacacacacacacagagagagagagaggggggggagaggagagagagaggaagagagagagagagagagagagagagagagagagagagaggagagatttgactttacttggacttcctgcaggcttcaccattgttttaccttgaaagtnatacggtggtgcaggaggtgctgttggcataattgccttcttatctaagtccttggcttgtttctgcacagcataagtgtttggaccagtcctacctgaggctgcaccttcgggagcagatgcaatcagccttcggtggtgagaaactcctttnctgcagagattcagtccttgatagatttgaaaatcccaa

SEQ ID NO: 83 - DNA, 6253 bp, Rattus norvegicus
  misc_feature (1)..(6253): where n may be a or g or c or t/u, unknown, or other
tgtagggagcggtgcgacagctgtatgataatgaggtgaatctggcgccctcttaacaacagtactgagcatgcgtggagttttgtatctgacgtcagtctggctggggcggtactatgctaaatgggagttcatgcctcgccaatctctggaggacaagtagctgggatggcagtggggtgactcgtgccccaccaatccctaaaagaagattagcatactgttgtgtatataagccgagcggctttgccgctcggcgcggtaacacttaaagctgtaacacttggagctgtaacacttggagctgtaacacttagggctggctgccgccgcctccctgtatcaacaaagaaggtctcctacagtaaaggctgttgagaagaatccaaccgtgttgtgtcttccttgccggacgaggtgggcgcgacaaagtggtggcccgtacggggacgaggacatcctcgtggatctcagaactcttcagcttcaggaggagcgacgtcgtcggaaaagttcccggtaagggacgataaagttctctggaggtgagcagagacgatggaagccttggtttagaggctaaaaggtctacagtctacaacaatgttgtttccaataggatcctttgtgggcaggatttataattttgtttctttttttctttgtgtggaatagagaagccacagacaacaagcttaagccgggccccaaacctctttggcgaatggtctgtgcctgcttagaggataaacgatgtgaggaagctgttaggacaggtcagagggtccttgcagagcatcaacaaagtatgtcagagggagtaaaggtcttgaaagaaaaaaagaaaagaaaaggagataaaaggaacagagagaaggcagagatgaaaaaagaggataatcaggaccaggaaacaaataagatatattctttaaaagccttgaccttagaaatgtcagacaatctagaaagcatcactgacagcttagagaaagtgaaagtaaaggtagaaccatcgggtcccgggcctcccgcagagcaacaaaaagaagcacaagactccacctcagttccaccaccagactcatattgacccctagaatgggaactcaggtagtggatacagattttaaaggccccagtaagcagaattcagaaggatcacagaaattgaaagcatgtgcaaagataaagatttggggtagtggtagtggtcaaaaggggacacggtaataatggtaaaatgtttttgtgtatgtgttcttttagagttatgttaaaatctagagaaacaaagttgattctcatagatgcttttagtctttggaccctgactagagacagtttacaccctagacaaaagagacaatggggttgagaaaaacagtcctcccgaactctccacagatgctttggcaaaagaaggaagtgagcttaagttttttgaagctctcctgggaacagaaggaggtgggagacgtcttgcctccttgctggctcctattggagaagtgcttgtttctggttctgggttctttaggtaggatgtctgggtccctttgggtggaacaccatctagttcttttcctctgtgtctgttgtctgtccttggtgcaccaagctgtggatgtatgtcaatttatgtctgggttttgcttctcgttgcttgaatgttttgtgtttcatgtttaaaagaaaaaaaatggttaaaactttaaatgctggttgattcacccattgatgtagctttaactcctttcaagaaaggaacaaataaataaaaagtttcaattggcttcggggagcctacatctgtagctagaagcctaagttggctgggcaagctccccagggggctggctaaatgtttatactagccgccctagaagcggcctatacaaaagtggttaaggtgcttgaaaacaatcaattgttcatagcacctgaaaaggttcaaatgggccaaatgggagaatatttaggaactaaaatcacttctcatagcatttctcctcaaaaaattgaattaccatttaaaaacattaaatgactttcaaaaattactaggattcgaccctatattaaaatgcccaatgtagatttacaaacactttatgaggtcctgaaaggggattctcagcttacttcaccccgtgttttaaccaaggaagcacgattatccttgaggaaagtagaagaaagactagaaaagacaatactaaaaaggtataaggaagaagaagatctgcttttgtgtatactgagaacttttcgtcaacctacaggagtattatggcaacaaggtccacttctttggatttatccccatatttctcctaataaaacccttgaatattacccttctgctgttgcacaccttgctgtgttaggtgttaaatcttgcattcagcattttggtatttcaccaaagaaaattattataccatatacaaccactcaggtagaaacattgtgtgcattgatagatgattgggccatattgcgctgtagttttgatggagagtttggacaatcattatcctaaggatccgttgctacaattttttactgaacatccagtgatctttcctaaaatcactgcctcagagcctttgtctggagcgttagatatttatacagatggctccaaaacaggtgtaggtgcctatatggttgattctcaagaaccagtattaattcaatatagtccaggtaccccccaaattacagaatgtaaaattgtattggaagttttcacaagatttcatgattcttttaatttaatttctgctctgcttatgtggttaatgcggtacgctcacttgaaattgcagggccaattcggtcgactagtactgtatgtcaaattcttttagaattacaaaatttgatttgggccagaaaaaataaatttttcatacaacatattcgagcccatactaatttggctggtcccatgaccagtaataatgccctggtggatgctagtactcgtagagagtttatttttcatgctgctccggttgacctcgctagagaatttcatcaaaagtttcatgtacctgcctttactcttcaacaaaaatttaaaatctctagagctacagctcgtgatgtggtgttaagttgccaaaattgtgttcaatttcaccaccctcctcatgtagggattaacccttgtggtctgatcccggctaaaactttgggcagatggatgtcacacacatatctcaatttggcaaattttaaaatatgctcaatgtttctgttgatacatgttcttgggattaatacatactactctgatgactggtgagaaggctcgtaatgccattagccattgcttagaggcatgggcagcctggagaaagcctgatagtctcaagacggacaacgggcctgcctacactacaaagtcctttcaggcattttgggcagacaatacaggtcaaacatactacaggattgccatacaatccccaaggtcaaggaattgtggaaagagtacatcgtaccttaaaagagctgataaaaaaacaaaaagagagaattgccagcagccgaacaccaaaagaacaactttctttagctctttttactctaaatttcttagttttggatgcacatggccgctctgctgcggatcaccatgctgctactacacctataactattgtagaagtaaagtggaaggatgtcttaactgatgaatggcgtggcccagatcccgtgatttcgagatctaggggagcaatttgtgtttttctgcagaatcaagaaaatccaatttgggtacctgagcgcttgactcgaaaattgccttctgctcttcctgaagatgagactacgaaccctactattgctactgggaatgataatacaggttaattcgctcaccctgtgggctattgccagatcctggccagtacccatgccagttcatagcaattctactgttttaccaacctttttctctacctcctgtttgggtgatgttccttgtatagtgccaactggagaaatgccccaacggtatgccgccactaacgtttctctgttgcataccttttgttttaccattaaagactcttccctgccctgtatttggttatgtagagccacgttagctaattggttgaatcctattaagtgacagaacaatgaacaccgggatcatcctggctgctttggagtcaaattgcccagggagtctcttcacagagcgaggacatgccagtcgatagttcctgctgatcttgaacattacaacactaattgtgatgcataattgtagtgttccatcacgccccagggcaagataactatgcacagaataggtctacccgtcgtagagtcttacccgcttgccccccacatcaagagtttccacctaattttaccccatgtcagagtccattccatagaacacaacaattcctaccgggatntgaattttcccctcctcttgnccatgtacagtatgactggggggagaataagactgncanacataatctctggccttggtttcaatgggtgctgtccaatgagcaaggggcatatacatccctgaccccttttgcgaggttgatgggtgagaacttcatgctgtataatgtttcggctaccagaaaaaatgataccaggttgaccaatattcaatataataacctcttggaacataatactgacactagtacttcagtatgtgttagatcaccttttttctttctgataagcactaatgtcaacaatggtgttttaaattgtaatagctctgatgtagtctgctatttagctgaatgctgagatgacaacaatgacaccacagtaatggtcaagattccctcctttgtgccaatcccagtagaggcaaacccagatagttttcctattcttaatttggtgtgaaccaaaagagattttggaattacggcagtcataatttcagccatcgtgctgtctgttgccgcagctaccacagctacgattgctatggccaatcaaatacaggcggctgaggctgtcaatcagattgtagagagagctacaatggcgctagaaatacaagaagaatttaatactcatttggcatctggccttctattagccaatcaaaggatagatttagttcaagaacaaattgaaacgctgtatcatatgacacagctgtcttgcgtttcctccctaagaggtttatacattactcctttgcaagccaacttttctcaacattctcaacagagcaaagaaatctcaaattatctgaaaggaaactggtccatgaaaacagaacaactatccagacaattgctgatgcagattgctgtcctcaacagcactaggctggaccccatcacaattgaagactttacctcatggattaccaatgctttctccttttttaaggagtgggcgggcatgtttgcctggggagctattgtcctcctgggatgcggagtatgtctctggcttattggccgtttaaaaagagaacatgccagacacaaagcggttgtttaccaggctatgaccgccattgacaatggtgcttctcccaatgtatggctggcctctttgaaagattaagagttcgccctagatcatttttgtcacagtcatgtggggtcattgtatccagggacgggcaactttcctcgagctcggaccaacctaagacacgggccctggtggcgatagggtgacccaatgacgggtaaggccgagtcatcgtcaggaacgacctaagacaggagcaacgacaagattgacgtgacacccagatcttagaccagtcattttattaaacaaaaaaggggggagatgtagggagcggtgcgacagctgtatgataatgaggtgaatctggcgccctcctaacaacagtactgagcatgcgtggagttttgcacctgacgtcagtctggctggggcggtactatgctaaatgggagttcatgcctcgccaatctctggaggacaagtagctgggatggcagtggggtgactcgtgccccaccaatccctaaaagaagattagcatactgttgtgtatataagccgagcggctttgccgctcggcgcggtaacacttaaagctgtaacacttggagctgtaacacttggagctgtaacacttagggctggctgccgccgcctccctgtatcaacaaagaaggtctcctacagtaaaggctgttgagaagaatccaaccgtgttgtgtcttccttgccggacgaggtgggcgcgaca

SEQ ID NO: 84 - DNA, 1516 bp, Rattus norvegicus
tatataaggtcagcctcttgcccatgctgtcctgtgtggtctttgcagctcgccatggctaggacagtagtagcactaaatatcctggtattgctgggcctgtgctggtccctggctgttgccaaccctcttcctgctgcccatgagactgttgctaaaggtgaaaatgggaccaagccagactcagatgtaatcgaacactgctcagatgcctggagctttgacgctaccaccatggatcacaatgggaccatgctgttctttaaaggggagtttgtgtggaggggtcactcagggatccgggagttaatctcagagaggtggaagaatcccgtcacctcagtggatgctgcattccgtggtcctgacagtgtcttcctgatcaaggaagacaaagtctgggtgtatcctcctgaaaagaaagagaacgggtatccaaagttgttccaagaagagtctcctggaatcccatacccaccagacgcagctgtggaatgccaccgtggagaatgccagagtgaaggtgtcctcttcttccaaggtaaccgcaagtggttctgggactttgccacaagaacccaaaaggaacgttcctggcctgctgttgggaattgcactgcggccttgaggtggcttgaacgctactactgcttccagggtaacaagttcctgagatttaaccccgtcacaggagaggtgcctcccagataccctctggatgcccgtgactacttcatatcctgccctggcagaggccatggtaaactaagaaatggaactgctcatgggaatagcacccatcctatgcattcgcgttgtaacgcagatcctggcctgtctgcactgctgtctgaccatcgaggtgccacctatgccttcagtggctcccactactggcgtctggactccagccgtgatgggtggcatagctggcccattgctcatcactggccccagggtccttcagcagtagatgctgccttttcctgggatgagaaagtctatctgatccagggcactcaagtatatgtcttcctgacgaaggggggcaataacctagtaagtggttatccaaagcggctggagaaggaacttgggagccctcccgggatcagccttgataccatagatgcagccttttcctgccctggttcttccaagctctacgtcacatcaggacggcggctttggtggctggacctgaagtcaggagcccaggcgacatgggcagagctttcctggccccatgagaaagttgatggtgccctgtgtttggaaaagtcccttggtccctactcatgctcttccaatggtcccaacttgttctttatccatgggcccaatttatactgctatagcagtatagacaaactgaatgcagccaagagtctgcctcagccccagaaagtgaacagcatccttggctgcagtcaataaaaagccctgatgggaattagcccagcccaccccacctctccatttccattctaataaaaccagatggtttcttcacatg

SEQ ID NO: 85 - DNA, 8655 bp, Mus dunni endogenous virus
ggtcgatcctcctctacactatgcttagtgcatgaggttcgaccccagagctctggtctttgtgctttcttgtcgtggcttcattaaatcttactctctatatttggtctaagtgtcttcttgggtccgcggctgtcccgaggcttgagtgaggaactccctgcggggattcttcatttggtgcgttggccgggaatcagcgcgaccacccagaggtcctaggcctacttagaggtaagattttctgttctgttttggtctggtatctgcgtgctgtttctacgtttggtgtctgtattctgtttcttcatttggtgcgatcgcagtttctgttttgcggacgctcggtgaggccgtgcttcgagagggagcgcggagtggataaggacagacgtgtccaggtgtccaccgtccgttcaccctgggagacgtcccaggcggaataggggaggaccagggacacctggtggacccctcagcctttgggagtggatgtggaatcccaccccataaggaagggagtggatgtggaatcccaccccgtaaggaagggagtggatgtggaatcccaccccgtcaggaagggagtcgatgtggaatccgaccccatccatctgaatctttaagttgtctgtggtcgacgcgaagtcgccgccggttttggtttcttttttgtctcagtctcgtgtccgctcttgttgtgtctgctattattttagaaatgggacaatctgtctccactcccctttctctaaccctggagcattggaaggaggtaaaaatcagagcacacaatcagtcagtggaggttaggaaaggcccatggcaaactttttgcgcctccgagtggccaacgtttggagtgggctggccaccggagggtgcttttgacttgtcactgatcgccgccgtcaggcgaattgtttttcaggaagaagggggtcaccctgatcagatcccctacattgtgacctggcagagtctcgtccagttcccaccttcgtgggtcaagccctggaccccaaatccttcgaaactgacggttgcagttgcccagtccgatgcagctgagaaatctggtccgtcagcaccccccaagatttatccagagattgacgacctcctctggatggactcccaacctcccccttaccccctgccccagcagccacctgcagcagccccacctgtggcagcccctcagccggaaccaacagcaagcggggctcagggaccggcgggagggactcggagccgccggggtcggagccctgcagaggaaggggggccagattccacagttgccttgccccttagagctcatgtgggagggccaacgccaggacctaatgatctcattcctttacagtactggcctttttcttcttctgatttatataattggaaaactaaccaccctcccttctcagaaaacccctctgggcttactgggctccttgaatcacttatgttctctcatcagcccacttgggatgattgtcagcagcttttgcaggttctctttaccacagaggaaagggaaagaatcctgatggaggcaagaaaaaacgttctaggagaggacggcacacccactgctctccctaacctcgtggacgaggctttccccttgaaccgccccaactgggactacaacactgcggaaggtaggggacgcctccttgtctaccgtcggactctggtggcaggtctcagaggagccgcaagacggcccaccaatttggctaaggtaagagaggtcttgcaggggcagactgaaccaccctcagtctttctggagcgtcttatggaggcgtataggaggtacacccctttcgatccctcgtcagagggacagaaagccgctgtagccatggccttcattggccagtctgctcccgatattaagaaaaagctacagaggctggaggggctccaagattatacgctccaagatttagtgaaggaagcagagaaggtttatcacaagagagaaacagaagaagagaggcaggagagagaaaagaaagaagtagaggagagggaaaataggcgagatcgccgtcaggagagaaatttgagtaagattctggccgcagttataaatgataggcagtcagaaaaaggcagaacaggattcctgggcaacagggcagtgaaaccgccaggtggcagaaagacgccgctggaaaaagaccaatgcgccttttgcaaagaaaaaggacactgggctaaagactgccctaagaaaagaaggcaattcaaggtcctgaccctagaagacgattagggaagtcggggctcagaccccctccctgagcctagggtaactttgtctgtggaggggactcccgttaatttcctgatagatactggagcagagcattcggtactcaccagccccctgggcaaactaggctctaaaaggaccatagtggttggagccactgggagtaaactttacccctggacaaccaaaagagccttacagatagataaaaacatggtgacccactctttcctggtgatacctgagtgtcctgctccccttctgggacgtgatctgttaacaaaactaaaggctcaagttcaatttacttcagaaggtccacaagtaagctggggaaaagccccccttgcttgccttgtcctcagcacggaagaagagtaccggttgcatgaagagcaacccaaaggtgcagcccctttagactgggtaactgcgttccccaatgtctgggcggaacaagcagggatggggttggctaaacaagtgcctccagtcgtggtagaacttaaggctgatgctacccccatctcagtaagacaataccccatgagcaaggaagctaaggagggcatccgacctcatattcggaggctgctagaccaaggaattttagtggcctgtcagtccccctggaacactccacttttgccagtacgaaagccagggaccaatgattatcgcccggtacaagacctccgggaagttaataaaagggtcctggacattcaccctacagtcccgaacccgtacaacttactaagctctctcccacccgagagaacctggtatacggtcctggatttaaaagatgccttcttttgcctgcgtctgcaccccaagagtcaacttctgtttgcctttgaatggagagacccagagggcggacagactggtcaattaacctggactagactaccacaggggttcaaaaactcccctaccctgtttgacgaagccctccatcgggatttagcaccctttcgcgctcaaaacccccagcttaccctactgcagtacgtagatgatcttttaatcgcagccgcctcaaaagagctatgtcaacaggggactgagagactcctcacagaactggggaatttggggtatcgagtttcggctaaaaaggcacaaatttgtcaaactgaggtaatctacttggggtatactttgcgaggaggtaaaagatggctcactgaagcccggaaaaagactgtcatgatgattccaccgccaaccacaccacggcaggtacgtgagtttctggggactgctggcttttgtagactctggattccaggctttgcgaccctagcagcacccctatatcccttgactagggaaggaattccctttgaatggaaagaagaacaccaaagagcttttgaggctatcaaatcgtctctaatgactgcccctgcgctagcattaccagacttgactaagtccttcgtcctatatgtggacgagagagcgggcatagccagaggggtgctgacacaagcactaggaccctggaagagaccggtagcctatctgtcaaaaaaactggatcccgttgctagtggatggcccacatgtctgaaagctattgcagcagtagccctgctgatcaaagatgctgataaactgacaatgggacagcaggtgactgtcgtggcccctcatgccctggagagtattgtgcggcagccacctgatagatggatgactaatgcccggatgacacactatcagagtctgctgctaaatgaccgggtaacctttgccccccctgccattctcaacccagccaccctcctccctctaacgaatgattccgtcccagtacatcgatgtgcagacatcctggctgaagaaattgggaccagaaaagacctgactgaccaaccctggcctggagctcctagctggtacacggatggcagcagttttctgattgagggaaagcgaagggctggagctgcggtggtggatggaaaaaaggtaatttgggcaagtgccttgcctgaaggaacttcggcacagaaggctgaactcatagcgcttacacaggccctccgagaggccgaaggtaagatcattaatatttacactgacagccgctatgcttttgctactgcacatatccatggggccatctacaggcagcgagggttattgacttcagccggtaaagacatcaaaaacaaagaagaaattctggccctgttagaagccatacatgcgcccaagaaggtagccatcatccactgtcccggtcaccagaaaggagaggacttagtggccaagggcaaccggatggcagactcagtagcaaaacaggttgctcagggggccatgatcttaactgaaaaaggaaatccgtccaaaagccctgaggatgaaaactatgatataaaagaactattttggactagtgatcccctcccatactttttcgaaggaaaaatagacttgacacccgaggaaggaataaaatttgtgaaaggactacaccagtttacccacctgggagttgaaaaaatgatgagactgattaaaaagtcccggtatcaagtccctaacttgaagtcagtggctcaaaagattataaactcctgcaaagcgtgtgcattcactaatgcaactaaaacctacaaagaacctggaaagagacaacggggagaccgtcctggagtgtattgggaggtggattttactgaagttaaacccggaatgtatggtaataagtatctgttagtatttgtagacaccttttcaggatgggttgaagcgttccccactaaaactgagactgcccagattgtggccaagaagatttttgaagaaatcctgccaagatatggagtacctaaggtaatcgggtccgacaatggaccagcctttgttgcccaggtaagtcagggattggccactcagttgggcattgattggaaattacattgtgcttaccgccctcaaagctcaggacaggtagagaggatgaatagaacattaaaggagaccttgactaaattggccatggagaccggcgggaaagactgggtggctctcctcccccttgcgctcttccgagcccggaacacccccggacgttttgggctcactccttttgaagttctgtatgggggacctccccctttaataaaagatggtggaacattggttcccgattcaggctctgtcttaccctcctctttgcttattcatttaaaggccctgaaagtaattaggacccaaatttgggaccagctaaagacggcctacaccccagggaccaccgcagtaccccacgagttccaggtcggggaccaagtcttggtcagacgacatcgaaccggtagccttgaaccacggtggaagggaccctatttagtgttactaacaactcctacggcagtgaaagttgacgggattgcctcctggatccacgcttcacacgtcaagagggcccccagtcaagatgaagaaacccacgaagacaactgggctgtggaagccactgataaccctcttaagcttcgcttgcgtcgcaggagccccctccatcaccctggacctagggaaccacaaccctcatgccccagttcaacagtcttgggaagtgcttaatgaaaagggagacgttgtatgggtagccactgcagtccatcccccttggacttggtggcctgatctcacacctgacatctgtaaattagcagcaggatctcccaattgggaccttcccgatcatactgacttgaataacccaccctctgaacaaaagtgtgtcccaaacggggtaggaagcactactggatgttcggggcagttctatcgagctaatcttagggctgcacagttttatgtttgccctggtcagggtcagaaaggaaagctgcaacaagaatgtagaggggcatcagactacttttgcggtaaatggacatgtgaaacaacaggggaagcctactggaagccttccgctgattgggacctgatcacggtaaaacgtggtagtggttatgataagccaaaccaaggagaaagaaacccatacaaatacctagattctgggtgtgctcttaaaaattacagccccccaggaccatgcaaaggtaaatactgcaaccccctactcataaaattcactgagaaagggaaacaagctcgcctgagttggcttaaaggaaataggtggggttggcgagtatatattccaataagagaccctgggtttatctttacgattagactgacagtaagagacctggcagtaacatccataggacccaacaaggtccttacggaacaggcccccccagttgcaccggctcccccgagagtcccagccgtgccagctccaccaacttcacggccctacacagtaggaccctcattagagacaaccttagcctccccaccactcctagatacagaaaaccgtctggtcagtctagttcagggagcctttttagttttaaataggactaatcctaatatgactcaatcatgttggttatgctatgcctctaaccccccttattatgaaggaattgctcagactagaacttacaatattacttcagatcattctcaatgtctttggggagagaacaggaagttgactctgacagcagtttcaggaaatgggctttgtttaggtcaggtgccccaggataaatggcacctctgtaaccagactcaaaatatccgacctaacaaaggtggtcagtatctagtgcctcccatagacacagtatgggcttgcaatacaggtctcactccttgtatatctatgtctgttttcaatagctccaaagatttctgtattttagttcagcttattcctagactcctgtatcatgatgatagctcatttctagacaaatttgaacatcgggtccgctggaaaagagaacccattactttaacgttagcagtgcttttaggattgggagtggccgcagctggggtaggtactggaaccgctgccttaatccagaccccccgatactttgaggaattacgtacagctatggatactgatctcagagctatagaacactctataaccaaactagaagaatctttaacttctctgtctgaggtagtactgcaaaataggagaggattagatttgttatttcttaaagaaggaggactttgtgctgctctcaaagaggaatgttgtttctatgtcgaccactcgggagtgatcaaagattctatggccaaacttagagaacgcctagatatacgtcaaagagagagagagagcaaacaaggatggtttgaaagctggtttaataagtccccctggctcaccactctcctttccactatagcgggacccttgattatacttctgcttttgcttacttttggcccctgcattcttaataagttagtagcctttattagagaaagaataaatgcagtacaggttatggtattaaaacaacaatatcaggtcttccaggaggccgaaaactcgctctaggattagagctatttacaagaaaaaaggggggaatgaagggttaaagtaaaaattactgaccacctgaactcttcttcaccccagagtccaacccctcccatctagaaattcttcctgaaacactcctaaactccttaacattcctgaactcttcttcaccccagagtccaacccctcccatctagaaattcttcctgaaacactcctaaactccttaacattcctgaactcttcttcaccccagagtccaacccctcccatctagaaattcttcctgaaacactcctaaactccttaacattcctgaactcttcttcaccccagagtccaacccctcccatctagaaattcttcctgaaacactcctaaactccttaacattcctgaactcttcttcaccccagagtccaacccctcccatctagaaattcttcctgaaacactcctaaactccttaacattcctgaactcttcttcaccccagagtccaacccctcccatctagaaattcttcctgaaccactcctaaactccttaacattcctgaactcttcctgaacccatcaccccaaagcacgacccctcccagaaacatttttaagataaaggtttcctggaacaacctcaagatgttacacagcccccttaattacgcagaactcccctggcagaacaccttgacctttggcagaactctttaattgagtaaaacctgtactttccctaccctgcttcccccctcggtttttgcctatataagcctgtaagaactttagctcgaggtcgatcctcctctacactatgcttagtgcatgaggttcgaccccagagctctggtctttgtgctttcttgtcgtggcttcattaaatcttactctct

SEQ ID NO: 86 - DNA, 158405 bp, Mus musculus
aagcttctctcaggaagtggaactctaggtgcacaacaccgtcctcagcactctccttactagtgaaacctctgagtaatttctcattgacagggtctggctttgctgttttgaaggcacacctgatccattgaaaacacttccgaggtttcacatcatgtatagaattgaaatatcagctcaccatacctgtcaaaagagagaattattttctcttaaaacctgccttccaaaacctcctctgcatttttgcaaccccaatttctttgtctaaagtatcttttctgtctgtgttgggtaattctgtgaggtctcagtttactagctgcttatgcatcagaaagtgttgcttatactcagccctgagtgattagtgcccttgattattcttggctgtcagtctagccattgtttcctgggttctgaattccttaagggtgggaactatgtgttttgattctgcatggcctcattaaatgtgcagaagatgggagatgggtggataaaatccccaaggattcaggtcttatttgcagcttatatggtagggcttaggtgtttttggttttcagtttccaaaatgtgagactggaaggccttggacaccatagtttggttaggttaagtactgtgggcttcgtgaggatgtggaagcaggatgagccactccaggaccaggatgccacacacactggccctggaaccagaccctggttgacagacctctctcctttccagaaaaaggcattgctggctctgaagaagcagagcagcagcggcccagcgagccagggcggtgtcaaacgctgtaagtgacagagacagagagtccagggggcagcagcagagggcttccctccacagccagcataatgaatgcctctctccttccccctccctctctccccagcactgtcagagcagcctgtggtggacactgccacagcaacagaacaggccaaacaactggtgaagtcaggagccatcagtgccatcaaggctgaaactaagaactcaggcttcaaacgttctcggaccctggaagggaagttaaaggtgagcacacaggaagattgtctggaacgtcctggcatcagctggaagggggtgggtgggggaagtcatgcatgctcacatatgagcaacctgtgctgttctgagtttagggtgtttctttcttgttccttgagacagggtctgactgtactcatggagtcaagtgatgctctggcctcagcctcagaagtagtttttgccactgcagcccactggagcgctaggtttctgtctatcacaaagaaacctgagcccagtgtggtggcacatgcctttaatcccagcacttgtggggcagaggcaggcagatttctgagtttgaggccagcccggtctacagagtgagttctaggacagccagggctatacagagaaaccctgtctcgaaaaacaaaacaaaaaaaaacaaaacaaaaaaaaaaagcctgggtgatgcccacatctcttttccatatttgtgcttcttggattgaagggaggtttgagtaatgaaaccagttactcacatcagctgatgtagtggcacacacctttaatcccagcacttggagcagacaggccgagagctctaacataaaggacagcctggttctactgcgcaagttcaggatagccagggccacacagagaagcactatcttgaaaaaccagtcaaccggtccagcacatcatcataagagtgacaggagcaaaagagaagcagagaagagagagggaagagctctcctgatccacgctaacatgggtatctgcccttttccaggacccagagaaggggcctgtccccactttccagccgttccagaggagcatgtctgctgatgaggacctacaggaggtaatggtttctgtggggccagggttggggacaagaagagacccacacactgtggaccaactccggcacctgggaatcatttgaattgttctctgtcttttctttccccttagccatccagacgtccccagaggaaatctctgtatgaaaggtcagagagagcaccgtttggtgtggggtcagaggccagagtgactggaaagttcagggctagagtgggaggagccagctgcagaggcagtgttgactccacaaggtttggaagaaggtcgaaccccctttggtccttactgtctgcctctccccagctttgtgtcttctagtgatcggcttcgggaactgggacaagatggagaagaagcagaggcccccggggctggtgatggcccacctcgaggctttgactggagctatgaagagcatggtagcgcccgctcctcagcctcccctccccgaagccgcagcagggaccgaagtcatgaccggagccgagatagggatcgggacaaagagagagacagagaccgagatcgagatcgagacagagaccgggataaagacaaagacagagaccgggatcgagacagagaccgggaccgagatcgggaacgagaccgagagggccctttccgcagtgagtgatcttagccagggtttaggtgggtcctgctaagtagaaggtgaggtggacccagtaatgactgtggttcctaacccacagggtcagactcattccccgaacggagggcccctcgaaaggggaacacactgtatgtgtatggagaggacatgacgcccaccctcctccgcggggccttctctccctttggaaatatcatcgacctctccatggacccacccagaaagtaagcatgagcaacatcccggggagggagctgcctggtctccatggagtttcctgactctgctttctctctcacccagctgtgccttcgtcacctacgagaagatggagtctgcagatcaggctgttgctgaggttgggacttctcagaccgttcctcccatccctcctgtcatcctcctgcttcttcttttcaatatctgcttctagaggaaacttttctcctgactgagaaaaccttcatcctcacattcctggttggtctcccagggcagcagcacctggctccatgtaatgcccgtcctctgtcccctcccctcttgtcccacagctcaatgggacccaggtggaatctgtgcagcttaaagtcaacatagcccgaaaacagcccatgctggacgctgctactggcaaatctgtctggggctcccttggtaaggatgaggctcctcccttcccctctctgcagcatagcacttccttgagttccctaaagtgcccaaggtcaggatcttcacgtaggtagtggatgaagaattgccagggcatctgtcaggtgagggaaggagagcagcactgaaatgtgccctctcagtggtggcacacaccttcagccacaacacgtgggaggtggagccaggtgagttcaaggccagcctggtctacagagcagagttcagaacagccagggctacacagagaaatcttgtcttgaaaagccatttgggcagggcagtggtggcacacacctttaatcccagcacttgggaggcagaggaaggtggatttctgagttcaaggccagcttggtctacagagtgagttccaggacagccaagactacacagagaaaccctgtctcagaaaaccaaaaaaaaaaaaagaaagaaaagaaaagccatttggaaaaacagaacagggtcctctgtcacagacaggaaagcagaagcctagttgtcgcctctgagctggagtgttacctgaacttggtattgtgggtctggacctcaagtagaagaccaggcatggaaacatagattagtgttctgtgtatctggaaccatcagaggtggggattttggagattgaaaagtgacctgagactggtttagagaatcaagagcattaggaagctaggctctactgtctgtgcctagcatacctccagcagtcctggcttgctaggcccaagttaagtctgcagcaaaggagccatgaagaagagtccaagctaagaacaaccccagaagctctgggctgtgggctgagaggctctgaaaagagtataagaccaaagaggaggcctgtctcttagccccacagggaatccttgggagggatgagcagtatgaggaaagaaaagctgaacacttgagttcggagaggtcctcatggggtctctcagtgtggacagcccattctacccaaaacaaacttttctgaggaaggagtaagcaaagtccttgcacacactaggaaggaaccagaattgaccagtgtaccagcaaggtacagaaacattctgatcttttaatttccatgtatttgtgatgttatcatagtcacatctctaactgtgttaacattctggattttctaagccacagtgaggttatggccaccagagggcagagtaagccctggtggaccagggccagggctctggaccccaggtctaacgccactggtgcttcacttaactgtcactttcctccctccttagctgtccagaacagccctaagggttgccatcgagacaagaggacccagattgtgtacagtgacgatctataggaaaccttgtggatggcttctaggacatgaagctggattccttgtgcctcatatgcccccaagctggtctcagtaaaatcctggggtagaagcttttcacctccgtcagcctctagtctttcagcacttgggattggagttaagccttcaaaagcggctgtcagtgttgatgttaaccagtgcacgcccttaccccaaaaagatgtggaacacacttgttattgtaactgctttaatctgtcctcacactctccctgcaggaagctctttatagaaaacccaaatcctcatctttgagcttgtcctttagccagggcagcacctggaagaggttgatgtggaagtcccgggcataagagggtaccagctgttgccgcctctggtctctgcagacatctactactccccagctaatcacaccaacctgtgtagataagggtatgccatgggtcacttgacacactaataatcccagaaagcttccaagctggcctaaagaagtgcactgggagcctagctccccctgtcttctgtggtgcacataagccagacacttggcattcactgaccagttaagaacatagctgtcagatgaggtgggccctgttctgcccccttttccagcccccttttccagcccccttttccagccatgtacagcaggctttctttttgtgactcctgggcatctccctaagggactagagaggggaccactcacttgaatgaagcggcttctcttgtgaacaatgagagggcccccggaatctcctgtagaagagagaagctgtaggggaaagatgctgggcctgtggacttgcagcatagccagagagccacctcacctttgcatgtgttggggtcagcatagggatccacccctcctgtgcagaggaaccgtggagtgaccacctcagaggcatctttgaccttctcatagccttgggcctttgtagcatctctctcacaactggctttctgtaggcaacaaaggtgaaaaagctagctagctaagggaggaatgagacctatgtgaccctctccagaatcctcttctcaccttgtccccattcttgatgtacacctccttccgagtcaggctcttcccttgctcagatacaaacagagctttgacatccttcacagggagcaactgttcctctggaaaagtaatggggtcatgccagctgaacccttacttctcacccagcagatgtcccttgggcccataggagccaggccttgaactaagcagtttaacactttcaactccctctttcgacccctttgtcttgcaaatctcatccttgtcttatcccagactatgccttactgtgctgcttgcaggtggctgtctgaggaagcctcaaggctcgtgtggttccctccgtgcaggggagacagatgggcctatggagacaggtacagtaaggagccacagacaacctgttctgccctgtgcctccagcccaacctttcatagcatctctgagccccagcctcactcacctgagagtctggccatacttgagcttgttcttgagcttgactagggccacatcataatcatagaactcagggatcccttctgcctttttcccattaatattgtatttggggtggaacaggacctcttcaatctccaggtcccgcctctgaccccctgagaagagaagaatgggcaccatgtttatggaagcagcctcctgcctctggccccatctcatctttggggttctgtttccccatccttaactagtcagtgttaagggggtcggggggggctgtgctgagaacaggtgggctacaggtcataacatgtcagtgtttcctgaagatagatgggcctggaggtcagagtcttgactgcatccttacccacgctgaccttgatggaatgtttctgatcatccaccatgaagcagtgcgctgctgtcagcacgaagtactcagacaccacggcccccatacaggtctcatgtcctttcagagggcgctaggaagccaatgcagattaaccttggtgtatgtgtactgctggaggctgctctgtactagcccagactgacctcagacacaaggcaaccctgctctcacttccaaatgccagggcaccagcatgtatgtgctccatgcccagcatccttcccctttttcaggcagtttgataagttattgtattgaccttgaactcactgtagcccaagcaggccatgaatctctaccctacctcggcttcctgaaagccaggattacagctagtgtagacatttcccctcctcttccctctgcccttccttcctttccctcccacaagtacccactgcacgaatgcttacagtgactgagatcttggcttgccatggttgcttatgataatcgttgccttttttatgctcccacaccatgccacagagactcagagatttggtttcatctgtcagggaaagaatactgaaggctcaggtcattgtagtcaactttgttgggtccctgtgtgtctgttggcagcagaggcccagaaggggaaaggggagcaagcagggagagggttctgtgtgttagatgaggaaccccatggtgtagtaagaaaagattgaccaggagatctgaggactgagcatcttagccacagtcttggtgctgacttgctgtgctcagcctgtttctacatctgtaaaacaagctattagagttctgtgagtgtgagaaatcaggaagtaagaatagacgtgggggaggcatgacggggccagagagcgagccttccaggttttgatggctttggggtgggagacgttggcaacctcagtctgcagcttccccttgtacacccttgagtcttcctaccaatcatttggtagaaaacattctccaggtcttccatatccttgactttaaacacatgatgctcattgtcctttttggaagctaaggcattgatgttcacggagtccaccagaggcccgaccccaaacacatacacatctgaaggagagaaggagagggtgagagtccaggccctgaggggtgagggtttgagagtgcaggatcccaaatgggccactcacccaggtaatcctccctgggatttttgggatccctgccgatgtccagcaaggctcggatgtcctgaatgacagtgacagggtttccacccatgttgtgcaagcctgtgggaaacatgaggatcataaaagtgggacagagaagatacactgtctggagacacaaacacatgctcaggagatgggaggatggtggtgtaggagaaaggccttaccatcagtcataatgatgatgacatggcgggttctattccagccttcaggcggggcatcccctgcccagctcatcatgctatacacagcctggagagccctcttggtgttggtccctgacttcagcttgtggtctatagacaaaaggtcaccaaccttatcttcaagccacatttgcacctcagaagtctgtgacaactgagatcccacattcttcaacttttactctatagaccatgctggccttgaactcagagattcacctgctttttggatgttgggattaaaggcttgtgccaccaagtccagacattgtttaacttttgttatcacccacttgcccttgactcttccagcattctccattgcccaaggagacttttcttcaacctttaaccaatagtagtcttgtctgctttctcccgaagaaccccaagcttctgactaccacagccccaaggtgcacctcccggctttcccttccctgatctctgaccttcataactgatttggttgagcttctctgtgacccagtcggcatcgctactcctctcatcagacactctgaccaacactttggggactgtagcatatgtcaggagaccatatcgtggcctcaccccgtaactcgccacctgttcatgagcaagaggccattgtgtttaaaaaaacaaaaacaaaaaccagtgtggtgggtagtcaacactcctgttgagacagggaagaggctggaggacagcaggacctggacccaaaggatctggggacacaggaaaccagtcttgtaagggcagtggggtccagataaggtcccctcatttcaaagggaggggaactctgatctaccttctcaatcaagttggtgaggcaccgcttagcccctgtgaagttgctgcttccgatgctgtctgatccatctagcaccaggtagatattcatggagcccgaggggtctaggacaatcttcctcttctgctgttctcctaggtgccagcagagactcagcttctgatatgtacagtacctgacagaccacccatccttccctgggcttcctgctcagtctccctccttgtattctaacctgggctgtgcccatcctcagcatcggctccttcgatggtctctgtcagggaggataggaatgcttcggccacttcttgagggctgtcatacatgaaggaatctagggatggtcagagagtaggtcagatgatggagtactgaggacacgctgacagggtgataggatttcagaacgagagactcttagtgttgagccaacagggcaagagcagacccagggagcaggtcaagggtcaccttggcaggaaggctctgtcccactccatgagccaccttcttgacactttcgcttctgggagccacgcaggacaagtccccggctgcagtggtaagtaacaatgtcttcaaggcggtattggctacccaccttccttgtcccaataggaataccgggattgggacagtatccagctgcagagatataagacaatttgagggcccatgcattcccagggtgaagccctccagcagagggtaaagtcaggggtgaccaggttctcacctccatcatcacaaattgctgtttgcccatcccaccggccattctcttggcaggtgcgattagcagagccccggagaacgtaaccatcatagcattgaaaagaaatctggtcactcaggttgtagaagggggaccggggccagaattccccattttcaaagtcctgcggtcgtgggcagcgtattgctttaggaaagacaggtaaaagtcactgagcgctgtttctaggtccttcctggtcttagaaatcctgtgactgagaaacagtacctgcctagtcccctcaaccctactgtcccgcctcttgtgttatgggactattttgtttgctctgaggcaaggtctcatgtagcccaggctggcttccaactatgaagctgaagatcgttaagctcctgcccctatgtcctgagtgttagggctgcaggcacgcaccacacctgcttcatgcagtactgctttgtgcatggtaggcaagcactctaccaactgatctacatttctagaccccctttctggttttctgagtattgttttcactgcccgaggaaagcctcccatcacacacctgcagaggtgtgcctgtgctcaaccagcccacgggtcagactgccagtctcatagctctcatcttacccagcactgaacagcctccaccccactctgcccagctgcccactgcccacatcccccaatctccaacctctgcattccgccttctggacaatcttttggtctcgggtctgcaggtcgctccaggagcctgtggatctgcaggttcgagtctgcacggggtatgggtagaagccagagggacataggtactccagggcctgaccgccttggagaagttgaaaggagccgcctttgatctctactccctccagagagcaggagacttggggccgggcctcaagcactggagttgcgctcacacctgaggagaaagtctagtgaagtctggccccagaaggccaaagacagatgctggggacaaaaagaggatggaatatcctttgcttacctccagaggagaagcctaagaccaagaggacgaggcagagctgggggctctccattgtcatggaaagcaccagagagtccagtggcccaaagccctctccaggtcactctgggtgcctatttgacctcctgtccaaactgaaacccaaatgctggatctggctacacccctttcccactgtcccctaaccttttatgcaatctgctctggcatctgcagcctggccagcctaccctgcgcacgcagccactgcttcccggaacattcatgaaggagggccccagctgaactgccaactgaggaaacagaaactatgtgagccccacccttgactgaccaagggccagaacttccctttcaaagctccctcttagcccccagacccctcctaacaagcacagaccaccacctccactacccccaatttaaaagatcagtctttccatggactgtgtgatggagcaaagtccatccactgtttgtgcagcaaggactctgaccttcctggaatcttcctggcctccccaccccccaagacataagacagacaggatgtggaaatcattgatttttattaattacataactgggaaattccgtgtgaaagcaaaaggagcacgggtcatccacactagagagagacttgcttcacaggtggcacagaggtcccggcacaatcctggggattccctagcttttgccactgtctctgggctcccggggcccaagatttatgtatccaggagtgagaacgctcagaggtattagacaggaagttcagactaataaaggagtcagtgaccatgttaaagtggcagaaagtccaggacaccatccaggtgctgcctcagccagggctgcaggcggaaaagactaatgtggaagtcccttggcagaacaccacgtggaggtttcttgcgcaagtttttgttggaggaaccatgacaagggtcaaaaagaccccaactcaccaggcccacctggagggaagagacaacagggtggagatagtggtggccccactctaagcctcgacctctctggttcctctcaaaggcctcccacttgcccccagcaagaagaacttgtgccctggcagggaggcccctccgggtcctgcttctcacctggaagaacctgtatctccgtccaaggaaaacggctcccccagattctccttcagggaaagaaaagacagtattgtccagaacagtacactagcatttggagtgcttgctaaccggttacagggacaccgtagccttctccctggaagtccaggatcagactaacctttgcaaggattgtcatcttcctcctccatcccactgcataggaactggtctgtcaccacctcgctaacgtttgtcaagctggggaagatgtttttgttttgggagacagcctggatacaccttgtccactgcggtgtggggcataggagagaagaatgaggacattccaggagacattaggcagacctgtaaggtccaagaatcgagactccaggcagggctggacattctgggagctgcctccagggtatcccagcatcccttactaagctctcacctcaggtcctgtcctgaggttgatgttgagtctgttcccattcaaagctacaaaatgtgcaggaactttctgctgtgacagaagttctgtctctgccattggggagaagtgggtgttggtacagatttctttactcagcttgaggactgcagcccggtccctgctggcactctgcaagaacctgatccctgcaagctctggctgcaacccaccaagaacctcaagcctccagcactcaccatgatctttacaggtactacctggggatctccgcagagccatgttggctcccacagtgcaaggaaggcagatgggtctggggagaaagccaagtgtcaaacaggcccatcctcagtatcccctctggtgctttccagagcaccatcctctatagggtactctcccatctgggttcaggcacctggcatgggtggacattttcactttccgagatagcttcagcaaggcaatgtcatcagcatagaactctgagatgccctgcttccgctttgcatggacattaaaccctggggcaattatcacgtcctccacaagaaattctttgccatgctgagaggtgggatcacctggaaacaaaggtgaattagactggaccaaaggctgaggagagacagtggtgactctggccttgcagtgagggatctactgcagcccctgacttacctacattgaccctccacaggtggtggtcctccatctgaatgtcatggaagcagtgagctgctgtcagcacccactgatcagagatgagtgatccctggcaagtttccttgctcttgggctgcagggaagagacaacaatccgggtttgctgtgcctggctgtttttacctctgatgcctaagccctgtccctccttcctgataccttaaaggtgacttgccaaggtgtcctctcctggtcagaggcattggcggacatgttccccaccccacagatggtatctgtgagcttagagacatctatgggcaaaggaagatggggagggaagtgggtaagggccactggtccaggctgccactgtgagaccccatctgagtccccactatgctctcttctgcagcgggggacaaagcttactcacccaacatgtgctcaaagatctgttgcaaggcctttgcatcctgcaagatgaaggcatgcctctcgccatccttcttggaacccagctcattcagttctttccagtccacatccagcttgcccaccccaatagcatagatgtctggtgggaaggagggaaatcaccagagcctgtgactgagaggccacctgagacaggaagtgggtacttgaactcaccagctgacaaaggcctgagttagatgggctccatctccttcactccggctcgcttcctctcctactgccactcagccccccatgccccagcctcttagaagctcctcaaaccagcatgtacattccttcctcaggcctctgctccagctgcacctctggctggggtgctctcccccaggctgcaatgccccagaccctcccatgccacccccacttggcttcacatcatgtcaccactagaatgctaacgggctgccttgtttctcttttgtgtttgcctgcagtgggtagaattgtgtgtccccagaaggatgtgttcaagttctattctattgtggatgtgacctgaattagaattagggtctttttttttttcttttggagacagtgtctctgtgtagctctggctgtcttggaacttactttgtagatcaggctggcctcgaactcacagagatcctcatgcctccgcctcccaagtgctgaagttaaaggcatttgcccccccagggtcttttgcctcaggaggtggagttaggaacatcagcctaggctacctcttgagttggaggccaacctgggcccatccccaaaagaaaacaaaagagggctgaatgctcagtggtcagtgcttgccgcgcttccagaggactggagttcaggctccagcaccatcgactgtaactccagttccaggggaggtgatgtcctcctccagcttccaaaggcactcacaatctctcacacacacacacacacacataaaaaaaatgtctataataaaagtaaacaaaggcctggggttataactcaatggcaagtacttgcctggtaggcaaaaaacaaacaaacaaacaaaaactacattcagttcccaacattgcaataaatacataggctatttgaacccaaacatagctagctagacactgtagaaaccaaacaaaaattggtgtgaccacagaggtgaagattggggttttgtggctacaagcccaggaccccctgcagccaccaggcctctacaaagaccttgtctcagaaacgaaccaagaaaaaaatctttaattgttgtctggtcataggtcagcacagttttcagtcgccctagccctgaagaattatttgtttcttcagcagctttacccaccaacacttcaccgaagtgcctactgctgaagggacagcagagggacagtccctaccaggaacccaggcaggttcttcctacagtttcctgaaatgtgagatgctgatgaagtggcggtcgctctctgcatcagctcacattttccttagcttcctctcctacctgtgaagcaggcacactgttgactgtttctcacagaggaaggagtggcccacagccgcagccctctggagatggagccagagtagggagcaggcgcagtttggtagccagctcttccaggggatactcagatacaatcacacagaactatggggaaaccctcatggttcagggccagagctaggtcacattgaatcctgtgacagaggatcctgttcctatcccctactgatagggcttggatagggcagagcctcacccaggtagtcatctctgttctgttcgatgctcaggagctctctgattctggtgactgctttcttgggagagtcacccatgttggactttcctagaacagcaaaggaaaagaatgatccgtctagattaacttcagaatcctgcacatccctggaaacatgcaggacgttcagccatttcaaaacacactgcttcaggctggagagacgactcagtgggtaagagcacttgttgctcttccagaggacccaggtccagttcccagcacttacatggtggctcacaactgtctagaactcccttcccaaaacatccaaggccctatcatgacctgcaaaggcatgatggcgtgctgcaagttaatacagccattgttaattcctcaacaattagaaatacattaccacataacccagctatattttactcctgggcataactgagacaactccacacgctaccatagaaatatctgcaccctgtggttattgctgcttcatttactagagcaaagaattggagccaactttcttgtccatcagaagatgagtggaagccaggcgtggtggcacacacctttaatcccagcacttgggaggcagaggcaggcagatttctgagttcaaggccagcctggtctacagagtgagttctaggacagccaggactacacagagaaaccctgccttggaaaaaaaaccaaacaaacaaaaatcaaaaacaaaaaacaaaacaaaacaaaacaaaaaaaagggctggagagatggctcagtggttaataacaccgactgctcttccgggagtcccgagttcaaatcccaacaaccacatggtggttcacaaccatctgtaacaagatctgactccctcttctagagtgtctgaagacagctacagtgtacttatatatatatatattaaataaatctttaaaaaaaaggagatgagtgataaaatttggagtgtgtgcatatgtgtgtgcatgtaatattgtgtaattttggagtatacgtatgtatgtgtacacacacacacacacacacacacacacatgccagtgaccttcccagcatctatagggtttccaagtctagaaggcagctatggaggtgttggcaattgtgatggcaaaagttataattgctggggcaaaagcagcttacgtttggtaatgtttacctttcttaaactctttgctattctaaggctaaagtctctgggttctggtagttaactcttgctgtatagcggggagggattgggtgaaggatttattgctagtgctcctttctgtggcctctacacctggctcattaaccctttgtgaaccagagagaaaagaaaaggaaagaaagaagttcatttacatagacaacacacacagacacatatacattcatatacacattctggctgtgctcgaccacctgtctcatctactccgcaagtattcactcatacctacacacagaccaacagacatacattggtgggtgggtggataagagagcccctaagccaacaactttcttttctctagccttttttttttaaagaattatttattttatatatgtgagtacactgtcgtcgtcttcagacacaccagaagaggccatcagatcctattacagatggttgtgagtcaccatgtggttgctgggaattgaactcaggacctctggaagagcagtcagtgctcttaaccactgaatcatctctccagcccccatctagcctttttataccttcttagacaaaagttctttagaaaattacctcataaataaaatgttacacaaaattgggagttacagaagggtgttggtagttaagttgaaagcagtgttcctctctgtaagctcattataagttcaaagcaacagttttcacacagcctggctttatcatagaacacacctgtggcctcttccttggatctgacctagaatgaatgtttttccttgatcacaaatgtgtcccaagtcgatttctcttcttagtgcaatttatgaaagctcattgtattccttattatgcagcctttacttgctattaggaggagtgggcatattctattcttgattttaaccttttttaaaatatttatttactttatgtatatgagtacactgttgctcccttcagacacaccataatagggcatcggattccattacagatggttgtaagccaccgtgtggttcctaggaattaaactcaggacctctggaagagcagccagtgctcttaaccgctgagccacctctccagcccccgattttaactttattatatctttctatcaaagcaactaagaccatctcttaaaacttccttcctaagattattttaattaaatcaggaattctttaaaaatcattaattcatgaaagctcatctgtatcctgatctgcaggaaacctgctcaataggatgggctgatgcccaggactccttaggctatgtgatactggcaagaaaggtccatcatctgcaaggatcaatcttgagatgaagtctcttggacctttcctctaagagttcacccatcttaggccaggcaaaaaggtgggccacctccaggaaaatcatctgctaaccttagcctttcctagatggctcctgacacatatgcgcatgcgcaagtacacacacacacacacacacacacacacacacaatttaaaggtatttttttgtttttgttgttttttgtgtttttgttttttttcaagacaggatttctctgtgtagccctggctgtcctggaactcactatgtagaccaggctggcctcaaactcagaaatctgcctgcctccgcctcccaagtgctgggattaaaggcgtgcccaccacctcccagaatttaaaggtattttaaataaaataaaataaaaatacaattattaatctgtgttccagacactggacaaggagcttcataggggagaggaagatttggcttgtttgtttgtttgtttgtttgggtttcgtttttgagacaaggtctcgctatatagccttgactggcctagaacttggtatatagaccaggcagaaatctgcctctgtgcttccacagagctgagattaaatgcaagtgtcatcataccacactcagctgctttttgtttttttcagacaaggtctcatataattgaggctgacctctaacttgccatgtagtcaatgctggcctcgaactcctgatccttctttcccacttccctccccagctgctaggattacaggtgtgcactgccacatcaggatgcaggctttccatacttttccttatttaatcctcagaaaaccccaggaagtatggccaactttattttaaaacagacagagctgtctgtcccctgcaggattcacatcaagaaccaaatcaaggaggtgagatccactccagacggccccttccatcacacccagagcagctgtatctcccaggctcagcaaggttaccaggcaagagtagacattttaaaatcacagacccttgttgtgcaaactgctcaagtggctttccataaatcttgtgtaaggcaatctggcagtggtggtacatgcctttaatcccagcatttaggaggcagaattaagtggatctctgagttcaaggccaggctggtctacatatgctgttttgaaaaaaacaatgcccccccccaaataaaaaaccctgtgtaagacaagaaagcagctgttgctgtccccattgtcattaagccatcatcaacacaagttccacttaagtaggagacagaaatatggggatgggggtgggtgaggatgtgtgtgtgtggtggtggtggggggagtcaggagttcaaagccagtatgggtactgaatgagatagtatcaaaacaaccggggtggagggaggggagagaaagaaaaagaaagaaactgaggcttgcctccacagacacacactaaaaattagaaaaacacagaaaagggtcagatggccctgcaccaggatggcaacacagctttgaagtatctatagtgcagtgttctgatgtcacatagcacagcaccacagccaaggttagtaaacagtagctgggctacttcagaatcatgctagagagttataagtgcttccagcacaaagaaaatgactgaagtgacagatgtgtcaatactcaggtcacaggctactcacagatcatgacactgagtttatgtactgacatgccgcactgtagctcataaatactatgactgtgaaagaatagaatatgtgtgtgactgtgtgtgagtgtgtcagtgagtgtgtgaaagtgtgtatgagtgtgagttcgtgagtgtgtgtatgtgagtatatgtatatgtgtgtaagtgtgtatgagtgtgagtcagtgtatgtatgtgtgaatgtatgagtatgtgtatatatgagtgaatgtgtgtgagcaagtgagtgtgagtatgagtgtatgtgagtatatgtatgtgtaaatgtgtgtaagtgtgtatgagtgtgagtcagtatgtatgtgtgagagtatgtatgtgtgcgtgtgtatgcatgaatgagtgtgtatgtgagtgtgtgtgagtgtgtgtgagtgagtgtgtgtgtatgtatatgtgtgtgtacatgtgtatgagtcagtgtatatatgtgtgtgtaagtgtgtatgagtgtgagtcagtgtatgtatgtgtgtgagtgtatgtatgtgtatgtgtgcatgtgtgagtatgtgtatatgtgagtgtgtgtgagcaagtgtgtgtgtgagtgtgggtatgtgagtatatgtatgtgtgagtgtgtatgcaagtatatgtgtgcacgtgtgagagtatgagtgtaagtatatgtatgtatgaatgagtgtgtgtatgtcttagttagggtttctattcctgcacaaacatcatgaccaagaagcaagttggggaggaaagggtttattcagcttacacttccatactgctgttcatcactaaggaagtcaggactggaactcaagcaggtcaggaaacagaagctgatgcgcaagccatggagagatgttctttactggcttgcttagtctgctctcttatagaaccaagactaccatcccaaagatggcaccacccacaaggggacctccccacttgatcactaattggtaaaatgccttacaactggatctcgtagaggcatttccccaactgaagctcctttctttgtgataactgcaggttgtgtcaagttgacacaaaactagccagtacatgtgtatatgagtgcatgtatgtgtgtgagtgtatgtatgtgtgagtgttgtatgagagagtgtgtgtgagtgtatgtatgagtgcttgtgcaagtatatgtgtgcatgtgtgtgagtatgagtgtaagtatatgtatgtgtgagtgtgcacatgtgtgtatgagtgtatacttgtgtgagagtatatgtgtgaatctgaatgtgtgtgtacctgtgtgagtatgtatgtgtgtgtgtgtgtttatgagctgggcatttcggcgcatgcttgtaattccagccactcagcatgctggagaggaaagactatgagttcaaagttagcctgggctacagagcacagcacacatctttaatcccagcactctggaggcagaggcaggtagatctctgagtttgaggatgggttggtctacacagtgagttgcaggccagagaaaccttgtatacagagaaaccctgtctcaaaaacaaacaagcaaagattaagagaatgagtctcacaactgcagaaagacaaccagaacacaagacttcagaacctatcctggcactctgccactgttgccaacctcctccagcagaaagggagacacccaccgtcagtcagaaggatgatggtgtgacggatttccttccaggcagaggtctccatgcccaggcgatccatctggctttgcatcatggagtaaacgcggatgagaacctcataagtgttagtgccagtggcattttcgtgatctggaatattccagaagaaaaatctcttgaaaacaaaaacgctctccctgtcacctgggaatgggaaactctgagaaaccaccagaaacgcaaactaactgagtttctaataaactctgatattttgcgtgtcttttcaaacattttggttcttctaccgtagaaagttcattgcgaaaccagatatgatggtgcacatctgtgatcccagcactcagaaggcagaggcaggaggatctctctgtgtctgaggccaacttggtctacagaacaagttctagaccagccagggctacacactaagactctgtctcaaaaataaattaattaagtgaaaatgctcattgcatagacgtccatctcgggccactacaagttcccaagatttaaacatggagcgtccaaaaagttttatggtgttccagctggcacccaaacaggttttacacagtattcgggtggctaattaaagccttgagaagcacaccacatgctagtgggctgcagggagcttaagtcctgcaggtgcatttgaacgtggaccttcagtgtgttgtggaaacctatgagctatggaaactggaatcctactgatgccctaagaatgaacaaatgtgcattctctctctccctccctccctccctctcttcctgacaaaggatctcatgtagtccaggctggcctcaattttcgtagccaaggataacctaggacacgggggcaggaggattatgaggtactagggttggaatctagagcctcaaatgtgctaggcaaaccctctgccaactgagccacatctccaggcccctcccctctatagggccgtcccctcttcaggctccgccccctcttctgatccctcccctcttttgcccccccccccccgaatctgtctatggtgcttgcttcaccctctactgtccacctcacccagtgggggacaggcaaacctttgtagctggcagagtccagactggtgatcacctccgtcacatcctgggatctctcactcaggatcgacatgatggttttgggctgagaggcaaaggtgatgatagctacgctgacatttacctcaaagctgaagatctgtggagagtgggagacaagcggtatggggcgggcgctgcaaaatccaagggacacagagagacagtactgaacctgacaggaaagacccttcgtgaggagagcagccttgaagaaaccaagggaatgacacatgctgagcttgtgccccgacagacggatgacccctcctcatttcacccgcccatcagctcagtgaggggcataatgagcttgcccacctcacttagccacttcagcctgaaccataccactgatgagaggtgcaggcagcactgaagctccttaattttaagccctggggcagtctttagaacacacatacacactctctttaaaatacaaatcgggtatccccaccccaactccagaagggatggaggagggactgtgggagggagtgaccaggagtggagcagtgagcgagaagaaaatgaatttaaaaaattaaattaaataggggtgggggataaaatatggaatgtaaatacattaatttaacatttaaaatcagattaaattaaatttaaaaatccaaattgggggctggtgagatggctcagtaggtaagactgctcttctgaaggtcaggagttcaaatcccagcaaccacatggtggctcacaaccatccgtaatgagacctgactccctcttctggagtgtctgaagacagctacagtgtacttatgtataataaataaataaatctttaaaaaaaaaaaactgcctccttcttcccttcgtctctgtgcggctctactttcaactgtactgtactgttctccacaaactctactgtactctcttcttcctgcactgtactcccttcctcctgtcttgtctgtctctcccttaagcaacttctcttttaaaaaaaaatccaaattgggacagggctgaagagatgaatcagccaagctgtggtgactctctgtgagttcaaggccagcctggtctatagcgaaaccctgtcttggaaagaaaaagaaagtccaaagtcattctggactatatgtaaatttgtctcaaaacaaacaaacaaacaaacttaggagagtgtctagtggtgtagcttagtgtcagagcacgtcctgggcgtgcgtaaaagtctaggtttactttccaagaacaacaacaaaatttcaatgtagctggaagaaaaaactatatatatgaactgttcttaaataaacaactttttaaaattgttgggctgggtgtggtggcctagccctttggaaaggcaggtaggtagatctctgagagcaccctggtctacgtagagttccaagacagccaaggctatatagacagaaccttttgtggttttttgtttttgtttttgtttttgttttttgagacagggtttctctatagtcctggctgtcctggaactcactttgtagaccaggctgtcctggaactcagaaatctgcctgcctctgcctccccagtgctgggattaaaggcgggcgccaccatgcctggctccttttgtggtttttgttggtgctttctttctcccctttcctgtgtgtgtgatgtggtgtgtgtgtgtgcgtgtgtgtgtgtgtgtgtgtgtgtgtgtgtgtgtgtatgagagagagagagagagagagagagagagagagagagactcttagtgtttctgcctctgtactcagaactcacggaagctgctcacacacccagcagtctgagcctcccatctccctgggattacaaacacacctatggcttctgatatttcattcagattccagagatctgaaatgaagcttgtgcagctcgtgcctttacacactgagccacttccccatttccccagtcctttagtctttccttggccttatgcagtccgaggctggccttgaactcctaaaatcctcctgtctctaccttacctagcttgaaatgtgaaatcagtggcttgataaaaattgtaattattcaataggagagtcagattcttctggtacacgccataggtcatgttgataactctttggaggccacagccctacatagatgacatagatgatgagttcctgagaacacacagctgagcttggctcctgtgtggtagtgtctctcggcacctgacccagggccttctacacagtaggtgtcccgaaacatttatggaataaagatatctcctatacattgaattcatagttctggtaccctggggagacttctggaaggagacagattgtctggggctctgaacaaggaaggagaatggatggcactgagaagccatgtagcccttgatttctgaccctctccaccatgagttcggcactcttcttgaagatgtcaaagtctttttctgtcacactctgagaagcatcaagcagcaaatagaggttcaggtgacccgagcgctggattatgatcttacggcccaaactttctgaagcaaacaagaaacaatgcatcagatgtccagccccaccctgtgttccaccaagggtcatctaacctcctagtacccaggtatcttgcctctctcctgcttcatccaagacccttttccaatactcacttgtcagaaggttctgggtgggattggtggctccaagcaggttggtgagggaggtgtctagggcagatgctacatcctcagggaagtcgtaagagtaaggctctgtggaaagagtcatatgaggggcagccaggaccaggcttgggcatggagacctaggaggacattaaagatactcacgtcggcaaatgggttccgacccactccacactccattgctctgacactcccgctctgcagagccagtcaataccatatttgaggaggagcagcggtacctgaccttgtccccaaggtcaaagttcaagcctgtccgagctgtgcccactgagatgccagggttggggcagtggctagctgcaagtgaataaagacaggtagacaggacctggaaatgtctgctggtctaatcgtccttgtccttcaggccacattcttccttattctagaccccctaagccaccagaaccatcaggctggagaccttaaataacccccagcacttagagttcaggtcctcagccacccactgagaactgacccaggtgtcacgtgcactttatctaccactgggcaattgccacgcaccatgaggatggtcagctctcaacctagaggcgatttcagatgggggtgggggggaatgtggagcatcgagaactctgctaaacatctggaacacccactggggaaatcctgaataaagctgaggttggccaatgtatcacctgggaggatgaagccaggtgagaaatcattcctaaagtctcactctccacagccccaaaccagacatcactcaagtacccaacaggacgagaacaatgagtaatactttataacgcattcataacagaatactatacaattaaaaaaaaaaaaggaccacaaactcttgtgactacatccataacttccaaaaggaaagttgccgagcaaaggaagcggggtcgagggccgtagaggtggctccacgagaggttaggagcacttgccgctcttccagaggacctgagtttaattcccagcttccacaaagtagttcacagcaatacgtaacttcagctctaaggcattcagcatcttcttatggcctctatgggagtgcatgcatgcagcatacgttcacatatgtacatacacacataaataaaaatgtttgttttttaggggctggagagatggctcagtggttaagaacactggctgctcttctagaggtcctgagttcaattcccagaaaccacacggtggctcataaccatctgtaatgggatctggtgctgtcttctgggctgcaggcatacatgcaggcagaacactgtatccataataaataaataaatcttaaaaacaacaactcttttttaaaggaagccatttttttttaaagaaagcgcacatccctgcatgactctatttgtatggtgtgtaggatgaggctggcaagattgctcagtgggcagaggcagttcctatcaagctgacaacctgagtcccattatatcaggctcttccagttgtcctctgacctccacaccgccgccatggcataaccatgccttgctggagaacacaggataaataagcaaataatatgtaaaatgaagtaaataacaggtagactttgttggaagttagaggaggctgccttgtcaaaggagaccttgtggaagggaagtttcctgcagtgtggcacatacatgcgcgtgcacgcgcacgcgcacacacacacacaaataaataaatgttttgaaacaggatctcattgtgtagccctagctggcttagatagaattctctacatagatcaggatggcctcagactctaagagacccacctgcctctgcctcctgagtgcagctagcattaagagtgtgtggagctgaagaaattcatattttttaatcttcctactatggagtttggagtatagttcagtgccagagtgcctgcctgcactccaagaaccctgggtcccacctccagtctcacacacaagttgcatgctttaatacagggagattacatgtccaatttaaaatgaattatatttaggtttgaataaatggcagtttgagacgaatgcaagggagtgagtaaagtgtcactgtccgggtagctgggtgaggcctgctacctaggggacactgctttctctgtgatggtgaagctgggcatgttgatccgcactctgcctgcttaggcaagagaatcgggaggagctcaaggtcgacctgcgtttgaagctaacttgggctacttgagaccccgtgtttataaaacaaagtggttcaaggggatcctaggagacccacttctcccaaacaccactcctagggctgggaagtacttaaggatcaccaggttccagcagctgttcagggaagttgggatggcaggaccctgggaagaaccacacatgactaagccagggccagggaggatggggggggggggggggcgggaacagcatggccactctagcccactgcagccccattaactcaccaggcactccctttttaaagtttttatctttttgtttgtgtgtttcagacggggtttctctgtatagtcctggctgtcttggaactcactttggagggcaagttggagtcaacctcagagatgcctgcctttgcctcctgagtgctggagttaaaggtgtctgctaccactgcctggctattctgattttaaaaatattattattacttatgtgtatttctgtgtgaagaccaagacaagagcattgggtcctctggagctggtgggtgtgagcccagtgtgcttgctgggacccaaactctggtcctctggaagagcagcacgtgctgtaactactgatcatcttgagagccacactattccaattttgcaggtgtaaaaactgaggtacagcagctggagagatggctcagcaattaaaagcactgactgctcttccagaggccctgagttcaattcccagcaaccacatggtggctcacgaccatctgtaatgggatccaatccctgtctctgatgtgtctgaagacagggacattgtgctcacatacatgaaataaataaataaagctaaaaaaaaaaccaacaacaacaaaaaacaaaacaacaaccctgcggcacgggaagggtagtgagctgtgcagaggctaactcaaagcagctggagccacaccaaaccccagaggctgctctgagcctaacccgctgcaatcggtctctcccaggtcttgcctgtaatactttatggagttaaatacaaagtgttgttgtgaagcatttagaaaagccgactgctcaggtttcccggtttccgtagttcctgcctgataatctgagcactccagagactgagaaggaggtgagttcaaggtcatcccagctgagaagtgggcctcccagggtcccctggagccactctcttttataaacatggggtctgagtagcccagttcagcttcaaagaaagggaagaaagagagggaggggggaggaaaggagaaaacaaaactgaaagttttgtagagctggtgagtcagatatgaaacctagacatgctcctagccggtcagtgatgtgcggcccacagacctcatcccaccccgatctaggaacattactgaaccaccaagaacactaggctctgtccccacaaaagctttccggggctgcaagcccacgccccccctcccccgcccccaacagtcagaatgcttacccccattgtcacacacagccgtctctccatcccacaggccgttggggcgacagtaccgcacaggtgagccccgcaaggtgaagtcttgctcacactcaaagctcacgttgctacccacagggtaggacaccagccgagggaaatagatgccattttcaaaggatgaaggagctaggcatcgaaccgctggagggagaaagaggatctgggcaagagcggagggtggttgacaccacagctacagttggggaggggtcttctgttaggacccaaaccgattaggtcagccaggtgcgaaaacatgaaaagagactgatgtggtgacagcccataataccagtacttaggcagctgtcatagaagccctctagactatatagtgaatttgaggccaacttagactgtatagctagccccaaaaaacacaagaggtgctcaagaggcagaggttggtggatcaattgcagcaagtgtgggccagcctgggctatatagcatgaacctgtctcaaagaacccagaaagccaaacctggtggctcgtgcctgtctagctggcactccaggggtgggcgggacctaggcaacataagctcattctcagctgcacggtaagttccaagctcacctttgaaagcagcgctctaagttagcagatgcaaaacaaaatgaatccagaaggactaggaaaagggactcaaaagcagagagcagggcaagcaagactaagaccctaatttctgctcccagccccaaagaaatccccaaagtagactgaaacctaagattatggttttagaggtgtctcagcgggtaagagccctgactgctcttccagaggtcctgagttcaaatcccagcaaccacgtggtggctcacaaccacctgtaatggggatccaatgcactcttctggtatgtctgaggacagctacaatgtctactcatataaataaataaataaataaatacataaatacataaataaataaacaaacaaacaaacaaataaatctttttttaaaaagattacagttttaagcagttggtcgaatactgtcaacttaaaacagttcaacttccttgattaataaatagctgttaagggctctggtcaccccagtatctcaccaacaacatttgtggttttagggtgctctgaggcacttagcatccatttagaatggtcaaataatcctacagttaattttagctaaaaaaaaacaacaacaaaaaacaaacaaaaaaaaaaaaaaaaaacaatgtcttcttaagttgagagcggactttcctggtttgtttgtttgtttgatggttggtctgggtttgtggttttctgagggcctttgttggtgtgggttgtgtgtttttggagataggtctctggccctgggtggtctagaactcactatgtagaccaggttgcctccctccctctcctccctccctttgcctcccaagtgctggaatttaaggtgagtcaccaccacaccaggctttctgcagtattttgactctgtgtgtgtgtgtgtgtgtgtgtgtgtgtgtgtgtctgtctgtctctctctttctctctctctctctctctctctctctctctctctctctctctcttcctggagaacccactgctaataagctctggctgacactggtgggcactctccaaagcccaaagtccaaagggactcacgtttgcagactgctttaaccatccgagaggatcgcagggtgtgatgtgagctagaccttggtgtcagccactgtccgttgctctgacatttcctccaggctggggacgggtacctgcccagggggcaggagtagatgaggaggctcccaggggcccagccatggctgagggtgaaattaccaccggtgatattgacattctggttgcagaagagagcagccaggcctgcgggtgtgggaaagaaccgggagaaaggaaaaaccaggccagatgagagagaggcaagaagaggctatctgtccctttgacttgtgaactggacctggcagcacctgctacacctacagggccccaataacccctttcccagcctcctacctgggcccagctgcagcaggtagaagagagccagcagaggggccatggtctccaggacagtagaacggagagctaggggagaggaaaagtcatctgacttccccgagatcggaaaagacagcgctcgctcgctcgctcgctagaggggagtggcggggagtggcaaggggatggtaccaggggaaaaagagagagaaacccgccagggattctgaactcagctttggggcaggacctttgccccaacacacacacacacacacacacactgaagcaagcatatttggccttgtgtggcttgcattaagcacacaagccctgcaaaacgttttatttattttgtttcacgtctttttttggagtttgccacatgcattggggtccactgggtcttccccagaatagcttctgaggacttgaaactgatgttcctagaacttcttggcgtataggaagattcacattctttcctgggtccttccctgaaaataagataaaaagaaagccaacagttatttggaaagttggaaagaattcttagaggaaaaaaaaaaattattggaacaaccagcagattaaatgtccaagctgcaaaagataagagtaaaaaaattgggggttggtattcagaagaataaacagcattttgaagtttgagatacacttttatttattgaaaaaaaaaagaactcttttcatacaatatattttgatcatgttttttccctctgagacaggatctcacataacctagatggacttagaatttctaagtagctgaaactggccttgagtccttatcctcctgcttctgtcccccaagtttgaagattctaaacactgtttatcacactggcctcccagctatggggattttgtttgtttgtttgtttgtttgtttgttgctttaaagacaaggtcttactatgtagctctggctgtcctggaatttctctgtagcccaggctagcctctgcctcccacatgcacaggcctggcccagccatgaagaatttaacctgatatatcagcctctttgtgcctcccaagcctctggacgcagttactttccttgttactataacaagatcagggggagcaccctcctaggctcactgccaccccaagaaaacctgtcagatcagcaacaaaaataccatgggtttctatttctgggctctgtgtgtgtgtgtgtgtgtgtgtgtgtgtgtgtgtgtgtgtgtgcctcactaatcatgggtgtaatttctcagaccccttccatcttttgtgtgagatgggggtctctcactgattcagaattttgccaagtgaacagtctaactgaccagcgagcttcagggacctgcctgtctctgctccccagcaatcactgcgattacaatactgcacccggcctttttaacgtgggttctagggtattcacacaggaatctcacttgcacaacaagcattttgtgaacccagtcatctacccagtccccatctccttgagactgagtttgaaaccagtgctagcctcaaacttgctgtggagcggaggcagggcttgacttcctgatcctcctgcctccaccttccaacttctgctttactgccaccctgaggaagcacttttcacacacacagctcttggagccttggaaaggacaatgtcaggcttctggttcctccaggccaccttccccagaggcttccctgtaagcccagacactagggtcctcacagaccctcctgacattggaccagcttcccaagacataaacaaaaagctgagagtttggttcttgggcctccctagaactagaaggtctgtccttgtcctgctgtgaggagacacatccctctccctctcaggcaacgcctaaacctctagagacccctaacactatgtgtgcacataaccatatgtgggcgtatgtctgcacatgcacagctctccctcactgcagcaactctaaccccctcccccccaggatctccacattcccgagggccattggggctctcttgacacatagggggaaggctgccggtatgacatgggtgagagggtggtgaccacgggcaagcagagaaaggatacgtgttacaactgcccacacctgctctgttctggatttacccaacagccccctcttccctttcagtgacataccttcctaagtgtggcacacagatgtttcgtcttctcccctgttcccagaaactgctctggagctccctaccctgtcaactccacccctacggtaaactggagtttccagatgggggacagacattcatgcttgctttcttttgggacagaaatgagagattataccccagcagatcttgccccacccctagccccagatccagtgtggtggaaggaattcagtttttggcttacaatggccaggtgtggctcagacacgttcaggctcagctctgcactttagttagctagttcgtcactgtcacacatgggccagtgagaaaaaaacccaaggctaaaatatcacccaaagtgggaggatcagcctgctatgggggtacacacctataatcccagcactcaggaaaccgaagcaaaagaattgcaagtttgaggtcagcttgagctacgtaaccctccagcgcagaaagggagaagacctacgtatcatcctatggatacgaaagggcaatgcgcggagtttgagaagagccactcacggaggaccagcatatgagcacggtacactcagacagtggactaccacgcggcttctcaatcctaaggttcatctatatagagtaggacacctcgagactggaaaatacaggctattgacgacatacacagtatgtatgggacgccgtcttctgtggagaaaaaaaaaagcaaacaaaaatgaaaacaaaactggcatgggagatataactgtacctgctctccccttctcccacccctttggtttgttgtggtttcttctgtgtgtgctaggcaaggccttatctctacccccagccccacaactctgcatacatacagaatttttcagaaaactgaccaggagagtcaccttggggagagctggggccgaaagatgggcccaagacagagcgttacagagcccaaatctgtatttttgcctgtgatgcttgtttgctggagacaaggtctctcacagcccaaatcctctctgtagccctgcatgctgggattatagacatgtgccaccacacctgacatatataacactgggacttcctgaatgctaggccagcactctacccactgagcttcactctcaatctatggaaactttttgttgatttgtttttgtttttaagatgagatttcacttatgtagggctagctggcctggaatttgctgtgtagaccaagctggcctctaactcacagagagctgtcttctgaatactaggatgaaaggcattagccactgtgcccagctggtgttttgtcttggctttgagatttactcttattgagtgggcctagtggcacacacctttgatcccagcatccaggaggcagaagcaggtagatctctgagttcaatgccagcctggtcttcatagtgcggtgcaggccagccagtcttacatatgcatagggaaaccttgtctcaaaagtaaataaataaataaaattgggaatgaataaataactttgtaaaaaaaaaaaaaaaaaccccaactgagcaaaggatgaagttgtgggatacactgaagctgtgggatacgctgaagctgtgggatacactgaatcatcctgaagttatatctgcagggaccataagctgtttcctgacttcagttaccatgagtcagttccttggagccaaatcatattctaaatttctaaaattccaactgctgagatcaaaaagcttggagtggtggctcatggctgtaactctagcactgagtcgggaggatcaggagcgcaaggtcatccttcagttctgaacaaattccaggacaggctcagctagcagagaccctgtctcaaccccaccccaccccaccccccaaaaacagttgtgtggaagaagggagtcagagaggctgaagcaatggctcagtgggaatcaggagttgctgataagcctgcagacaagcctgcattcaactttctagattcatatagtgggaggagagagccgacttctcaatagttatacacacacacacacacacacacacacacacacacacacacacacgcttgtacatatgcatgcatacacacacatcacatgtgtatcccacacatacattcatgtgaatgcacacacatgcatgcacaagcacacatacatgtatacacacatgtgcacaggcctgcacacacatacgcacaccaaattggaaacttctagttctttggaaagttagttatgtcaaatggtgttttgctggggcacacaggcgaaaggatgtcttgcttaagcaaacatgtgaaagactgttttcctgaagcagacaaaggtgaaaggatgttttgacatagcaaacacgtgaaagaatgcgtgatgaagtataaatatgaccccacagacatggggagcatgagaattggtttggtttgctccactttgctattctttgctaaagacacacatgtattggttcactttacatggtgttgtgagctccactgtgataacgctgccagtgagagaaactcacctaagatctgctcaggaggttcctggcagtttcatcaggattgaaccacagctacccagtgtctgcttgctgaacggactggactgtagctgccttgtgtctacctgcctagagggctggtctgcagctgctaaactgtatttggtgtttgctacaggactgaactactgccaaagaagatcaactcgcccgcaaagaactattgctgaacaggaccgcttcccccatatcctaacaacttttctcttctactacctctgctgggtggtgggctagaggagaggttgagcccttattaaaagtaggtcgcaaaaagtttatgcttacacacatacacacacaagtaattttttaggggatgggtggggcctggtgacacatagttctagtcactgatcggcagatctccccgagttcaaattcatagacagtagaaacaaggagttgaagtgactttgaacttgctgtcaggcaggggttgatgtgcatggtaaaggggatgtgtgtgtgtggggggtctgtgtgtgtgggtctatgtgtgtctgtgtgtgtgtatctctgtggggggggtctgtgtgtgtctgtatctgtgtgtgtgtgtctgtgtgtgtgtgtgtgtttgtgtctgtgtggggagggaggtctgtgtgtatgtgtgtctgtgtgtgtgtactggttctcacagaacccagctgtgggaaccatgcaggttacttatcaatactcccagtttctgcctcccagccacaggacagaaccaaatgtctgagtcttgctgaagttacagctgaaagacccccgaagatgggaggccctcacttaattgtagggatgatgcgacccccccccccaagaactcacgagagactgtccttgctgcaattgcacaaggtttattgacaggaaccagtgcactggggccgactcgtatcccatgcaggggtagaggagttcaacctcgagcagctgggaaagggggtatttaaaggaaaaaccataacccaagggggtagggagggtgttattggaaaatactgaaaataccagtgaagaatcacaagggggaactaaaaatcacaaggggaaactccctgcttctcaagattgttctcaagattttaatctttgtggtcggccaggtcctggaacaaggtcactgaaccggcttgtataattatatgttctgtggtcagccagttctcagaacaggctgcttcagagaccaactatttttctttcttggctctaacttggtctagggggtcaaacttaatttttctaccttacacagccaagtggcattagacaatgactgtgagcaggggtcctacacatcagaagtccttagttagctgacagagcctcagaatgcactcaagagacagaagcaggaggattgcataaattccatgcttctctaacctacatttaccaggccagtcaggggtacatagtgagactctgcctcagacgagcgaacagatgtggtgagtttccaatgtaatactgccaggggtctcttctccttccttctgaatcactaagtcaggaaacgaacccagggcttcttgtgtaatacttggccaggcaccgctgagccaccccggtcaactaccaatttgtgtttgcttacatactgctcagttttggctttttgagacagggtttctatgtatagtcctggctgtcctggaatttgctttgtagaccagactggccttgaactcggagatctgcctgtctctgcctcccgagtgttgggattaaaagcctttgccatcagacctggctgcatattggctgtttgacaccgggtctcaagagatctggcagcaggataggagccaaagacagccttgaggtgagtctcctcatccccctgcctgagccttgaggtgagtctcctcatccccctgcctgagtcttgaggtgagcctcccacatgctgggatggcaggcatgtctattaggccaagttgtgtaaattttttaattatttaattatttcttttagttttgagattataatttaattacataatttctctccttcccacttctcactctaacttcaccggtctctttcaagttcatggtctctttttccattagttgtcattacatacatccaacatatatgtgtgtcgtatatattcatacatacatgcatgtacatataccatatatgtgtgtatgtatatatatatatatatatatatatacatacatctatgtatatataccacatgtatatatgtatatatacacacacacatacatatggcatatacatacctaaatacataagtatgtgctcagtctgtataatgttacttatatgtatgttttcctggctgacaatttggtattgagtgaccaactgctgtgctcttccctggggaaagctccgtctgctctcagctttccttagttgcctgcagtcctttgtgtagggctgaggcgtcatgggcttccccatctgctctggcatgtccatctgtccatccgtgccatccttgtccagttcctgtttggtggtcatgttggtgagactttaatggacggagtttctgatgttcctagaaaacacagtctcataaaaaaaactcactgattctcaggctttgacagtctttccatccctcttcctcaatgatccctgagccttaggtccaagggtcatattgtcatatccattgggagtgggctccacaagtccacatgttgatgggttgtggctttctgtaactgtatgtctgatgccaagagaactttctttgaagggggaggggtgtggactacccttgtctgtggtataaagacaatctttaggatatggttaggggaaacgttgtaaagtgctggttggttataggttctcctccaagagccatgacttcagtagctgtgtgtggttggctaggcatgattgccctcctgctaagtgagtaccaggtctgattttatttatttttatttattttttattttttattttatttatttatttattggtttttcgacagggtttctctgtgtagccctggctatcctggaactcactttgtagaccaggctggcctcaaactcagaaatccgcctgcctctgcctccccagcgctgggattaaaggcgtgtgccatcacgcccagctaggtctgattttaatatcaccttttccttacatttccttattctatgtttttttgtttgtttgtttttttttttttttttttttttttttttttttttttttttttttttttttatggggagcattctccacgatgcactgtggaggtcgtaggccgtaggacttacgggcatctgttctctctttcccctgtgtggaccccagggtttgaactcaggctggagggaaagtgcctttacccactagccctagtaactttaatgattttttaaatgttaaacttttgctttacaaacaaatttaaaaggactcttatcatttttatgctgcgtgtatgagtgttttgcctgtgagtaggtaatgtgccccatgtgtatgtctggtgcccttggaggccagcagaaaatgccagattcccctgggaccagagttagagacccttgtaagctgtcacgtgagtgctgggaacagaacctgcaaccttggccagggagtacagctgggcatgttggtgcacgcctttgatcccgcacaggggaggcagaggcaggcggatattcgagtggtggtgactgtgttttaacccaatcccaattgctcgatattacaatgaaaacttgggcccagatgctgtgctgaaagcctgctggctcagacaggcagagaaagcacccaggtgaccttcctcctcagtcaacatcccaaaagcaatgtccctctcaaaaaacttccttctcactcaatatccctcccttctacttcctgacggcctctctagccctcctccttgactccttcttactctctatggttttttcttaataatcctatgtttgattcctgaaaaccagttggttgcttgtgccccgtcctgacttcatttaatgctgtttacagaaagctcttggattaaaggtgtgagccgcacgaccactaaaaacggtggcttttccagcaaataacacaatctcagggttcacagtgtgatcaactgtcctgcaacagtagtggggtctgtgggggttgtgtctgggaggtatatctaccctggcaggagtgtagaggtcaactttcaggagattggttctcccctcccacccatggctcttccacaccaagccttctcctagtactccctttgaagccttttggcaccggatcccccgactgacagtgatgatcaatggtcactcaccattgactcaatgagggtatcagtgaacacagctgcggtgggaaggccctgagaccagctccactgctcctgttacttaggcattcctctgtagccatgctgcctggtccaggcagagtaggcatcagatctctttagaagtctgaaaaggtttcagcacctgtccctctgcctgataaggaagagaggggggcctaggccatgcagtgcctgtgagcagggggtgacaccctggagcaccaactgtgaagaggtggagacaggatatttgatcacactgtgagccctgagattatgttatttactggaaaaaaaaaaaaaaaacatctgtttttactggtggtagagctcacacttttaatccaagagttttctgtaaacagaatctctgagcctgaactatatagcttgttctaggacatccaggataacatggagaaaaacctgtgtcaaataaataaattaaataaatagacaaaactttacaaactctcagttttaaaaacattttattttaaattaccgatatatgtgtttaagaggggaggtgatgtacctgtgagtgcaggtacgggcagaggccagaagagggcactggatcccctggagctgaagttacaagctgttaggagactccccacaagggtgctaagaaagggagcagaaggggctggagggatggctcagtggttaagagcactgactgctcttccaaaggaagaaaggaaggaagaaaggaagaaagaaagaaagggagcaggagtccttctcaccatgctccaaactctgttggttttgagatagggtctctatttagccctggctgaccagaaactatgtaggacaggctggcctcaaactcacagagctccatccacctggctctgcctcctgagtgctgggattaaaagcctggaccacccctcccagctccaactcccctccccctctctcttttgatggggtgcgattttaagacagggtttctctgtgtaaccctggctctcctggaactcactctggtcttgaactcagagaatctgtctgcctctgcctcccaagtgctgggattaaaggcgtgcaccaccgaagtcacctggccaaactcattccttttaacttgacagtttttcctatttcccagtgaaatatgcattcttcctttttaatttcttaaggatttattttatgtgtgtatgtatgttgtgctgtgtgtgtgcattcatgtgtctgtgtgtgtttaggatgtgtgtgcctggagcttgcagatatcaggagagggtgtcatatcctctggagctgcagttatgagtggttgtgggccacagggtgaattctgggtattccactggggtcctctacaaaaagaagtgctcttaacagctgggccatctctccagccccatagataattcttttgaaaagtttggtaggcggtggtggcacattcctttaatcccagcactggggaggcagaggcaggcggatttctgagttcaaggccagcctgatctacaaagtgagttccaggacagccagggctatacagagaaaccctgtctcaaaaaaaaaacaacaaaaaacaaaaacaaaaaacaaatcaacaacaaaaaagtttggtaaggagaaaaagaaaaaaatgagataagagaacagaatttttaaaggaaaattcttttgaaactgtcatagtggtgatgaggcatgactattccaggacttgagagaggcagtggggaaggcaggcagatgtctgagttcaaggccaggctggtctatagagtgaatttcagtatagccagggctaaaaaaaaaaaaaaaaaaaaggaaagaaaggatgaaagaaagaagaaaacaaagaaactgccagagtctatttctcataaaagcaaagacactaaaaataaatgaataaataaattaaaaaccagtgttaccacagatccagtgtgtgtttgtttgttcagtgtataagaggctccctagaaccctctatcagcctggtaagcattcagaaccttgagttcaaagataaagacatcttgattcagagaactgatttgcccaaggcttcactctagtgcagtaggcagtgaatgtggctttaaacaaggtgtaccagacacaatggcctacactccccctaaaatccacgacctgaccacaaagtgagctgggtgagggtacaagtcagagaattctaaaaggaacatgaaagaccacagccaaggtactgcctcgcggctgtctgcgccttctccgggaacagcatctcttgggtgtgagaattcggttcaatcaggaatgaactttgtatgggcggatgcaggtccagctgaaagccaatgatgtcaacacccagccatttattgtctgacttttatttgcaaaacacagcccatacataacttaattcctgtattcaagatgtcttggggggggggggggcatcgggttgcaagcagttgagcatcctcaggattgagaagcttcctggagggtgtaataaaaaaaatataacctgcaggcaacagcggccaccccctgaggactttattctttaaagccagtgtgggtatttggggtgcacagaagcgctggtgggctagccttcaagacaggtactcacattgaagttgtgttgaaggtagttttggagtggcaaagaaagccagtccggagtagagtgggtatctagggtcagggagcatctcctcttctgggacaggacagagtgggtgcagagaaaattatagatggcacattagtaccaatataaataattgcacaatttgcaagattagtcccagggttaattacacagtgaaggtgaaacgcactaatctttcacagtatgagtggggttcttgaccttggcaagaagtcagagtggataaaatagaagggagaatgagtgtgattgacgtaaccgtgtgctctaagccggacaagctgagggcaagcgctggctcatcaggctttgtggaaagtgaaattctcttttagatcaggactacagtgggcaccagcttcagaagacttggaaaagtctggaaatgtggcctgaggaactgtgcacacattcagcggaggatgcacccgagggcagcagtgatcctaagattggtaggccaccggcaggtccaaggctctgggaggtggcctgactcgcacagctgggcgggagtgacgccttgctggagagcaggtggccgcgcagattgcgcagttcccggggagcgcgcgcgctggggggcgcggggcaggcggggctagcggggacgcgctggggcgcgggaggggggctctaggagccgggggcggggccgagtgcgcgggccttggcacgcacgcgcagacgggccgcgggccccagaggcagagaggagggggagcgtgaaatagggggcggtgtggagcgtatttccgctctggcggacaaataatcctggccaaaggggaggcccgactgtccagccctttaaccgcgtgggggtgccgggggagaaaaggggggtcggggagggggaatcctgctcctttaattccctcccctcttcctccgccccgagtccgcgaggacgctgcgctgcgcggggccttggaacactcggcacgagctgcccccgcccctccccctcccgcccacgcggagccggcccgcgcgcgcaccccgtgcacccccgcgcctgcgcgctgccccggccctgcccgtgtgtggggggcgtcgctggccccgggggggtgggggaccaggggggaaaaatcagcacgcggaaccgggccaggtgagaggcgcgtgcacccagggtcgtgagtctgggtgggggggcgtgccacggagatctgcgcgtgggaggggggcgtgcacgacctgtccgggcggtgggaggacgtgaaaagggggactcacagcagcgcggcccaggctagagcgaggcgggtgaggagtacctgcaaccgggggccaccccagagttgcaatcctctggttttttccccccatccacccctttatccattctcccgtgggcgcgcgggctgcgggactggggggtgtggacgccgctgccccgcccccgggaaccacgcctccctcctcggagggaccgcgcctccttggaattggggaaactgagggaggcgcgccaagactagggaggtagggatgaggggtctggagccttggcctccgacagccagagacctttgtctctgactcgtttccttcccacccagggcagtccactcccgccacaatggcctctggggtggaagtcctgcgcttccagctgcctggccacgaggccgcaacgttgcggaacatgaaccagctccgtgcagaggagcggttctgtgatgtgaccatcgtggccgacagcctcaaattccgtggccacaaggtcatcctggccgcctgctcaccgttcctccgggaccagttcttgctgaaccccagttctgagctgcaggtctcactgatgcacagcgcgcgtattgtggcggacttgctcctctcttgctacacaggcgccctggagttcgcagtcagggacatcgtgaactacctgacagcagcctcctacctgcaaatggagcatgtagtggagaaatgccggaacgcccttagccagttcattgagcccaaaataggccttaaagaagatggggtcagcgaggctagcctcctaagcagtgtcagtgccaccaagtccctcctccctccagccaggaccccaaagccagctccaaaacccccaccaccacctcctctaccccctccgctcctgcgaccggtgaagctggagtttccgctggatgaggacctagagctgaaggcggaagaggaggatgaggatgaagatgaagatgtttctgacatctgcatcgtcaaagtggagtcggctctagaagtggcacaccggctcaaaccccctggaagcctagccgggggtctgggtatcggggcctctgtgagcagccacctgggagagctggcccagagtagtgtggcccccaacactgttaccccaccgcaaggggtggtgaaggcatgctacagcctgtcagaggacgcggaaggggaaggcctgttgttgatcccaggaggccgggccagtgtgggggccacctcgggcctagtggaagcagcagcggtggccatggctgcccggggggcggggggcagtctgggggcagggggtagccggggacctctgcctgggggcttctcaagtggaaaccccttaaagaacatcaaatgcaccaaatgccctgaagtgttccagggtgtggagaagctggtcttccacatgcgtgcgcaacacttcatcttcatgtgcccacgctgcggcaagcagttcaaccacagcagcaacctcaaccgccacatgaacgtccaccgtggtgtcaagtcccattcatgtggcatctgcggcaagtgctttactcagaagtccacactgcacgatcacctcaacctgcactcaggagcccggccctaccggtgctcctactgtgacgtgcgctttgcccacaagcccgccattaggcggcacctcaaggagcagcatggcaaaaccacagctgagaacgtgctggaagctggtgtggctgagatcaatgtcctcatccgctgaaaggccaagaggctgggggcggtcctgggcccggcagaattggggaggggcggggtttgagggcaggcaaacattttgagggaggaagactggagagagagagagaccatgcctcaaagagcagaagaaaaagatggagccggagacagggttgataaggctgagggaatgtgggatcccaaagaaagatttcttttttgaagaggtgcataaacgatgtggaggaagagagggaaaaaaaaaaaaaggcaaagttgaaagttttggagaacagctctttcctggctaaagctggctgggggggggggggattctagcgtttcttgagatggggtgggggtgggaattgtagggggattgccaggaagcagcttacttgcccctggttagaatagatgacagggagaagggagcggagggcgacacatgtatgaagtaccagaaggaagggaggagatttttgcatgctggggaagtgggaaagtagatacaaggctcaccggaaatgaaatgatatgtgccaggtaagagaacacggtgggcaacctgggtaggtaatgagacattaggctacagtagcgagaacagtgagtagcggaggggtgggggggcagggcacttagaaaaaaaggacacaaggagggctgttggggggagggagaggagtagagacatacagtatttttaaagaaaactattttttaggattttttctggagtttggggttttagtttttgttttccataaaaataaacaaaaaaaacaaacaaaaacattttttctttatattctggcaattgcatgtgtgtgactacccaccatagattctcccagcgctaacaattgtagtcccatgccaaaaggagcctcaagcagagactcggaacacgccctaaacacttaggcagaaaccttatcacacagtgattggcaaccctggtgctggcataaaccatgcggggtttggtggcagtgcaagccatgggccacaggtgaccagtgaacccacagagatggcaaaagggcatctgttgcatatttttgctcaagttttaaggaaagttgaaataccagctaaacttatagttgattacctagaagactacaattcccagaaagctctgaaaagtttttaatccaaagaggactacagttcccataagatgccgaattggccttgggcccagtaacataagtacctgtctgtccaatattgtgtgagcaaccatacaggcattttcaagctttggctaggacttaatgcctggagggggatggtgccctcgatagtgttcagggttgtatacttgctgtgtctaccatcatacttaagctgtctgctggaccatgaccccccccctccatggagaagtatttgggcagaaatagttactgtcaatagattgaggtctccgctgcattcagttgacatatctagtgcaaccgaagacacttcccccagatttccaaaagcacactgacccagaagtaaaggtgtcttccgtgagtctctgtcgccccttcttgtgcactaaagttcaaaactgatatagtcccagccttctatctggcggctcagaacgggaaaggcacacgcggcagctgcaaaggctcaggctacacgtgttcccaaaaccgggcggggacagggaagccacagcccagtcgagcctcacccttgctcccggcggagcccaggctaggagcgaacgccctctcccctacaggccccagttctggacctccagggccattctggggggcaaaaatggccaagaggcccgcagcggctcctttaaggcgtcttctcgccctccctccttgtccacgtgacccggggcggccgcgcgccggctcggccccccgcgcaagcggcgatggcggcggcggcgggagctgctgcggcggcggccgccgaggtgcggaaggggagggggagaggcgggtgcatgcccgcgcgcgcgcccgggggaagcgcgcgctcgtgcaatgctccgggggtgcaacggggccggggggcccgagccgaacttacagcaaaccagggggccaacaccgggggcggatgaggggaccagggggtgggaggtggggggagtgggcgccgagtcgcacgtgccgccgcccgctgcccctgcgtgggcggtgggcaccgcgaccccgggagcccgcgcgaggggcgcgaggggccgtccgccgggctggggcgcagcgggcgttgcaggggttggtggccggggtccccgcggcctgggggacaaagggggagcggcgcgtgcagccgggagagggggcggggccggggcgcggaggccccgccccctccccctcctctgctcccggccccagagatgcggggtctgccgagagggagggggctgatgcgggcccgggggcgggggcgtgcggcccccacgggcggccgcggccgcggtcgggggggcgcccaccgagggcgaggtaggccccgaagcctgctctcgctgcccagggcccaggcgtcttgggccccccagctgcctgccgggctgaccggccccccggttccttgtctcccctcccagggggaggcccccgctgagatgggggcgctgctgctggagaaggagccccgaggagccgccgagagaggtgagtgcagcaggagcaggcccgaccggacctccaccctccccacccccaacacgggatcccgggagctttcagccctgaactttttcttttcccctcccgacagttcatagctctttgggggacacccctcagagtgaggagacccttcccaaggccaaccccgactccttggagcctgccggcccctcctctccggcctctgtcactgtcaccgtcggcgatgagggggctgacacccctgtcggggccgcatcactcatcggggacgaacccgagagcctggagggagatgggggtcgcatcgtgctgggtgagagactggggagtgagggagacggggcgcagaggggctttctgcatgcctgctcaccctgcaccccctttctgcctgcctcttttctaggccatgccacaaagtcgttcccctcttcccccagcaaggggggtgcctgtcccagtcgggccaaaatgtcaatgacaggggcaggaaagtcgcccccctcggtccagagtttggccatgaggctgttgagcatgcccggggcccagggagctgcaactgctgggcctgaaccctctccggcaacaactgccgcccaggaggggcagcccaaagtgcaccgagcccggaaaaccatgtccaaacctagcaacggacaggtgagagtgtggaagttggggtggagagacttggggagtctctgggtcggattttttgttttgttttgtttttgttggtggtttgttcttttgggtttttttttttttttttttccttcttccgggatttagccttagacctcttgtattcagattttttttttcgaatttaccaataggctaccaagtgtcagctgttgggctgggcctctgtgagcagagtaattgtcggcttcctggagtttgtgttctttggggaggggtggtcagcagaggagactgacagatgtagaattaattatatagttattgtcctaattacacaaatgactgggcaggatcagccttcccaagtttgtgttttttttgttttgttttttgcctctgaacaaatgcttagggaggttggtttgttcgtttgtttgtttgtttgtttgtttgtttttcaaatccctactttgagaccagtctcaaaccagataaagtttttactgggaactcttccctgggaaggccacataatgacagaatgtgggcggaggcgtgtgtgtgtgtgtgtgtgtgtgtgtgtgtgacaagaacctggaaatcaaaattatgtcaaggttttaagggctcttgattcagcttaagtatggcttgtgtagccttcctctgggtcttgtttcgtttattttgttgtttgttttgagctttattttgttttgagagagtagtttttgttttttgttgttttgtgtgtgtgtgtgtgtgtaacagggtctcactgtgtagccctggctggctggctgtgtagaccaggctggcctttaactcacagagatctacctttttctgtctcctacatcctggggctgaaggtgtacacacatgccttttatttataatcttttttttaaaaaagatttatttatttattttatgtatatgaatatactgtaactgtcttcagacacaccagaagagggaatcagatcccattacagatggttgtgagccacaccatgtggttgctgggatttgaactcaagacctctggaagagcagtcagtgctcttaactgctgagccatatctctggcccttgttttatttcctctttttgagatggtctcatgtagactgaacttgctatgatccaccccacccagcttctacatttaatttttttctttctttttttttttctttactctttctttttttaaaaacttttaagcttctgggtgttttacctgcacatatgtctgtgtaccaccttgtgtgtctggtgcccttcaagtcaagggggcagtagaccttgagtttgaaggggttgtgagcatcttgtcagtgctgggcaattggacctgggtcttccacaagagcagcaaccggctcttaaccactgcactacctctccgacaatgcttgttttctttttctgggaaagtgattacctcaccatggtgtggctgttcttctctggtacagaagttcgtgtttgctcgggctcctcatataaaattatgagagccaggtggatctcttaaggtctgggtcagctaagaatcaacatttgcatatgccttacacgtatctgtcttccttgtagataccttatagatgattagctaatgcctgtattagtagtttaaagactcctatatgggcacaacttttaaaattttatctgttgctgggtggtgctggctcacgcctctaatcccagttcttgggagactgaggcaggcagatctctgagttcaaggccagcctagttagagtatacacaattccttagacagccaagtctatatagtgagttccagggcagccaaggctacacagggaaatcctgtcttgaaagaaaaatattgattataagtgtgtatgtgtaatgggggaggttgaggggatggacgcagtagaggacatatctgtggagcctggtctcttccaccttttcatgccatctaggagtcagactcaagttttagggtttgcgcagcaagcacccctgcccactgagccatcttgctggccactgttctctttttaattttttttttttttttttttttttggcttttcatgatagtttttaaatgttttagctctgtgacctgtgacgggagagagggctcagcggtcaagaacacttaaatacctgtgtcagtaaagactgccctgtataggtacaactcttaaaagctgtcctgtatagaactctggttcagggccagagagatggctcagtggttaagagcactgattgctcttccagaggtcctgagttcaaatcccagcaaccacatggtggctcacaaccatctgtgatgggatctgatgccctcttctggtgtgtctgaagagagcaatggtgtactcatatgcataaaataaataaataaataaataaataaatctttcaaaaaaaaaaaaagaagaggaggactctggttcggatcccagcacacatggcagctcacagccacctataacttcagtctctagggatctcctccctgcctcaggctcctgcacacagggggcacacaaactcacaaagaccagtaaagaagcagcagataacgtaacctggccccccatgtgagccccatgggtttctggtcatgttttcttcctatatccttctggggagggaaggtttttttttttttttaattaaatttagccggaagtggtggtgcatacctttaaccccagcatttgggaggcagaaaccagaagatctctgagatttgggacagcctgatctacacagtgatctaccctgtaacatgtaacgccctgccccaagacaacaaaacaaaaaacaaattaacaccccaacaatacaaacagaactatgagagcctttctctctcaccatctgggtctcagggagtgaattcagttcaccaggcttggctcccaccattagctgctgagcagatgtgatggcttggggtagcttttttttttttttttttttttttttttggtttttcgagacagggtttctctgtatagtcctggctgtcctggaactcactctgtagaccaggctggcctcgaactcagaaatccgcctatctctgcctcccaagtgctgggattaaaggcgtgcaccaccacgcccggctttcgggtagcatttttttaaaaactcatttctttttttttttttttttaagatttatgggagttccctgtcgctgtcttcagacacaccagaagagggcatcagatctcattacacatggtcgtgagccaccatgtagttgctgggatttgaactcaggacctctggaagagcagtcagtgctcttaaccctgagccatccctccagcccttcggatagctttgtttgtttgttttttttttgtttgtttgttttttaatgtatgtgaatacactgtacagatggttgtgagccttcatgtggttgttgggaatcgaactcttaggacctctgctccctctggtcaaccctactcacttcagtcagccccactagctctggcccaaagctttacttacttttatatgtaagtacactgtagctgtcttcagacgaaccagaagaaggcatcagatcccattacacatggtcatgagccaccatgtggttgctgggatttgaactcaggaccttcagaagggcagtcagtgctcttaaccactaagccatcttgccagtcccccagatagcatttttgaggtacagccagccacaatactcccacctgggccccaggctgagggaacagacccataactttaatttggtggctcacttatttcacttagcacagtgccttcaagtttcctctatgttgtatatttccaggctccctttttgtccttgggtgttctgtttgtttttgagatagggtctcactcactctatagccctagctggcctgggtctcggatccgcctgcctcccggagtgctggaatgaaaggtgtagcccaccacacctagcctgggtgagtaaccttctgactgaaacgtgttccttcctgcttcagcctccaatccctgagaagcggccccctgaagtccagcatttccgcatgagtgatgacatgcatctggggaaggtgacttcaggtcagtcacctctgctcctcccacacactccaggtggcctgcgtagtctatcccaggattgagagttcacttttctgtctttccagatgtggccaaaaggaggaagctgaactctggtagcctggtgagctggagaggaagacctacctggtgggggtgggagcggaggggaggggcggattggtgggctggagccaggaacctcagactctgtcatctttttctagtccgaggacttgggctctgccgggggctcaggagatataatcctggagaagggagagcccaggcccctggaggagtgggagacggtggtgggcgatgacttcagcctgtactatgatgcgtactctgtggatgagcgggtggactctgacagcaaggtgtgctggtgtgctcttctcaagcttccctacccagtctgttctttccctttaatagctctagttcaccgccctgtgttgtctgcaactgtttcttatatcccttatctcatctctggtcctctcattccaacccagcctcctccctgccttgtttgctccctttgtgttgtttgctccgttggcttttggctagttttgtttgtttgacagggtctcactagtagaccaagctggcctcaaattcctagaaatctgcctgcctttgcctctttagtgttgggttgaaaggcacatactgccacactgtgtgtgcgctcatcctggggttagaggacagcatctcgggcttggttctctttcgatgtagctctggggatcttaatctcttacagtttgtgggtttgagctttcagaattttcccccgtgtttgaggttgagcctggcgctctgcaagtgcattgtaacaggcctgtgctttatttttgctgattgagggattaaactcaaggcctcgcagggcgagcaagcactgagctgctacttaaatatttgatttcaggcctcattctctaccaacttgcctgggaatggcccggccttaacccactcctgtagtctgtctgcctcagcctcccgagtggctggggttaaaggcatgctttttctaaatggggatggggcttgagacagagtctcactttatttttttaaagatttatttattttatgtatatgagtatactgtagctgtacagctggttgtgagccttcatgtggttgttaggaattgaattttaggacctctgcttgctccggtcaaccccgctcactcagtcactgatcattctggcccaaagatttatttattattatacataagtacactgtagctaacttcagacacaccagaagagggtgtcagatctcattacatgatggttgtgagccaccatgtggttgctgggatttgaacttaggacctgcagaagagcagtcagtactcttacccactgagccatctcgccagccccagctcctgagctgatcctcttgcttctgtctccacgtttggactacaggcatgtgccgccatgtctgctgctgcttctgctttttgtttttgattttttggggggaagaaaatgtggcagtggttgcaggtgcctccttcctattgcctgtctttggaagctgtgtagggtgtttggtcagttcttgtgctggtcagtgttgacatgctccagaggcagaggcgtaggatctctgtgagttccaggtagtggccaggactacctagtgaggccctgtctccaaacaatcaatcaaaaagaaaactttgacattgggcctgtggtttccggtgatggcagcctgaccccttcgttagagagcacctccttagcttttcgtggagtgtggttggttttgttgccatgggtagtcttgtcagagtgtttcctaagaccggcccttgtcactgctgtgtggcattctgtgcctctgtccctatccaccctttcctgcctcctgcccacatcccccaccgggagctttccttggggggggggggggtgatgatatggggcctcagcagtcaccgagagagctgcctttgctggtttcccagcctgatttttctttttcagtctgaagtcgaagctctagctgaacagttgagtgaggaggaggaggaggaagaggaggaagaagaagaagaggaggaggaggaggaagaggaggaggaggaagaagaggacgaggagtcgggcaatcagtcagacagggtaagagcagagaccggcctacctggaggagtgggggagctgggagcagagctcttgagtcttcctcttccacagagcggttctagtggccggcgcaaggccaagaagaaatggcggaaagacagcccgtgggtgaagccatctagaaaacggcggaaacgagagcctccgagggccaaggagccaagaggtaagacggctcctctgctctcaggtcccctcctccggccccagagagcagcacacactcggatgctcgtgcatgttcactgtgtagaccgcatgtgcgcacgcgcccaggacctgtgagcccccactctcactctctctgtctctgtgtcaggagtgaatggtgtgggttcctcagggcccagtgagtacatggaggttcctctggggtccctggagctgcccagcgaggggaccctctcccccaaccacgctggtaattaattgccaactgccgggacagggagccaccagggggtgcccatgggggtggagggaaaccctgccacagctggggtgtccatgccaggctttggggttctagaacatggtggggtggctgggcggaaaggaggggaccctcccagtgggtgaggggcaaggcctccatcatctctgtctcttcctgtctaaggggtctccaatgacacgtcttcactggagacagaacgcgggtttgaggagctgcccctctgcagctgccgcatggaggctcccaagattgaccgcatcagcgagagagcagggcacaagtgcatggccacagagagtgtggatggagaggtgggtctgggtacggttggcttagggggcccagggtgagctagcctgggccctggcctcacccacatgcccccaccttccttcatccctagctcctgggctgcaatgctgccatccttaagcgggagaccatgcggccgtctagccgcgtggcgctgatggtgctctgtgaggcccatcgagcccgcatggtcaagcaccattgctgcccgggctgcggctacttctgcacagcggtgagtgaccattggggtggatgggcggtctggccagcaccggagagctccggggctgactgctgcctcttcccttccccagggcaccttcctggaatgccaccccgactttcgtgtagctcaccgcttccataaggcctgcgtatcccagctcaatgggatggtcttctgtccccactgtggagaggatgcctcagaggcccaggaggtgaccattcctcggggcgatgggggaacacccccaattggcaccgcagctcctgctctgccacccctggcacatgatgccccagggcgagcggatacctcccagcctaggtattggcctctccaccaccaccaccacccggttatccatcttatctcccttgcccccagacctcaaaacctttttccacagcgcccgaatgcgagggcatggagagccgcggcgcccgccctgtgatcccctggctgacaccatcgacagctcagggccttcactgactctgcctaatgggggctgcctctccgctgtgggtctgcccccagggccgggcagggaagccctggaaaaagccttggtcatccaggagtctgagaggtgagtttgtgctgttttcagggtgtgactgggccagaaacgcaggtgttgctgtcggtacttaaatctgagcagcccaccttctccccctccatcccctgacaggcggaagaagctgcgattccacccacggcagctgtacctgtcggtgaagcagggggagctgcagaaggtgatccttatgctgtgtgagtgtctgaccccaccccgagggctgtgcgtgaaagggaaggaccctcggtggcggcagcagtggtaacctgttggtaatgggcactgatccagtgcacaacttataagctttcccggcctggaggctgagtgttcctctagtgcggggcagtactgaggggctggcacggcttgcctagtggggaatcctgggaagtctctcttggtacagggctgtcccacccccagctctcttacctcttgtctcatctctgcctgcagtagacaacctggaccccaacttccagagcgaccagcagagcaagcgcacgcccctgcacgcggccgcccagaaggggtcggtagagatctgtcatgtgctgctgcaggtcagtcctcatgacccttcccactgtccaacccctccccagcatcccctctccctggtgccagccttcacactgtcctcacaggcaggagccaacatcaatgccgtagataagcaacaacgcacgccactaatggaggccgtggtgaacaaccacctggaggtggcacgctacatggtgcagttaggtggctgtgtctacagcaaggtgcgggatggcgctggagagctgggtggtgggaggaagaagggatacctgggcacggggtgctagctgaagggttcactggctcgtgtttccctcaggaagaggatggctccacctgtctacatcatgcagccaaaattgggaacttggaaatggtcagcctgctactgagcacaggacaggtggacgtcaatgcccaggttagcaacctggctgcccctcctgtacacagattctttggctatctgtcccttgggcatcagtcccgcttcttcctcagctgacctgaccctcccccactacctcccactgcccacgttgattccctcatttttttggttcatggaactcgactcccatctcttatctctgagtgcgtccagtgaggttccctgtgagcattggggggcgggggtgcatctgtggatacccattctctggctgtggttgtttccagaggtgcccctgagctcctattttctggccagcaagtctgggccctcattcccttcctccttccttccctcaggacagtgggggctggacgcccatcatctgggcagccgagcacaagcacatcgatgtgattcgtatgctgctgacccggggtgccgatgtcaccctgactgacaatgtgagggacactcaagggggctcagagaacttggggtgggtagcagcgggacccctatgcagagtgggggctcagttcaaggattgtgtcacctgcaaccaagtctctgcctctcacctccacaggaggaaaacatctgcctgcactgggcctccttcacgggtagtgccgccatcgctgaggtccttctgaatgcccagtgtgatctccatgctgtcaactaccatggggacacgcccctgcacatagccgccagggagagctaccatgactgtgttctgtaagccctagcttccccaacccctggcacccacaccccactgtccaatctctgacctaggccttatgttcctcttcaggttgttcctgtctcgtggagccaaccctgagcttcggaacaaagaaggagacacggcatgggatctgaccccagagcgctctgatgtgtggtttgcactgcagctcaatcgaaagcttaggcttggggtagggaaccgggctgtccgcaccgagaagatcatctgccggtgagtgcagtccagacatccatgcccactgccacggcccacgttggccagtcccaggccccttcccaggcacaggacatcccgagaattgctagaatcatcttgccactaggggaggtggaaataagggactcagccagtgagaccctcagtggacaagggagcctgtggccaagcctaacagaggtcagtccctggactcacatggagaaagtcaactcctccaaattgtcctctggcttacaaacacacctcatgacactctcacacacagttgaaaaaagctgagggcagggtgtggtgacccacacctgtaatctcagcatgaaggaggcagacagctgattgttttgaacttgaggccagcctgctttgtatctatgtaataagttccaggccaacaagggccacataatgagaccttaatctttaaacaaaagaaagaggagacgggcattggtggtgcacacctttaatcccagcacttgggacgcaggggcaggtggatttctgagtttgaggacccctggtctacaaagtgagttccaggacagccagggctgcacagagaaaccctgtctcagaaaacaaacaaaaaaggacaagagaacaaaaaggacatgttttccaagccttcgaggtggtggaggctggaggatttcaagtttgaggcagacacccagatagataagaatttcagagaggagctaggtgttacttgtgatcccttctattctgaaggccaaggaggaagactacctcttgagcctgcatattggaggctcaatgagactcaaaacttaaaaaaggaaaaacaaacaaaacaaaaacaaccacaaagctagtgtgaggcggcccaactgctgaaagtgcgtgtggagtttaagccatgaacccaccagaaggagagagctgcctcccgaggactgccctctgagctttccatctcattgtatcctgtgcacaccacactcagacatgaggctgctcgggccaggcggagagtggtgtagacctttaatctcgctctggaggcagaggcagaggcagaggcaggctgatttctgggttccagggctgtacagtgagatgctgtctcaaagaaggaggtgggttgccgggcgtggtggtgcactcctttaatcccagcactcaggaggcagatgcagggggatttctgagtttgaggccagcctggtctacaaagtgagttccaggacagccagggctatacagagaaaccctgtctcaaaaaaaccaaccacaaaaaccaacaaaacaaaaagatatgtaagtttgtaatccagatgtgttctgtgcaagctgagtactttggtgtttgtctgtccttatagcatctgaggaggcagaggcgggaaaatcataacttcacgtttaaggccagctggggcattgtagcaagactcagtctccagctaaaatttaaaagtccagagtccattggggtggtgacatatgcctctgaccctagcactcgggagccagggcaggagaatagactgtcgaagtcattctctgctatctttcagtctggggccagccggggctataggatgctgtatctcaccaaggaatgagaaaaggtcggggctgggaacatcggtcagtgggcgagcatttattggcctagtatgcaccgtgctgttgggctcagtctgcattctcaccaagaaacagaaataacccagtcactacttgggacataactatttcttagccgagattgttctccgtggtgtctttgtttgttttcaagaacgtctccctgcatgtgctgagataaaagtgccagcacccttagatcaaggaatcctcccctcagaactactctgccccactttgaccttatctgccccttctgtagggacgtagcccgaggctatgagaatgtacccatcccctgtgtcaatggtgtggatggggagccgtgcccggaggactacaagtacatctctgagaactgcgagacatcgaccatgaacatcgaccgcaacatcacccatctgcaggtaaggcacagccccgctcaccatgctgtgggagcacctccacaccaggatggggggcatgaagactccccctcacactgggaccaccaccactcactgtcctggaacatgaaccccactcactcctacttttctcccacagcactgcacgtgtgtggatgactgctccagctccaattgcctatgtggtcagctcagtatccgatgctggtatgacaaggtacgtgaccctcacctggcaggtctgccaaggagccaggaccctgctgtgttggggaagagacacagggtgtggcaggaagccctgccaggaatgcaatgggcctctctgctggagtatatgcaaatgcgcgctctagtgcctgcgcgcacacttcctggtctctgacctcagcctgcagactctgcaccttgctcttctgctcttggctggggtcagagtggagtttcctgtggagtcctctgggtccagggcagctgaaatgggccccacagagaaaccactatcccctccctccgcaccccaggacgggcggctgctccaggagtttaacaagatcgagccccccctgatctttgagtgtaaccaggcatgctcctgctggagaagctgcaagaaccgcgtggtgcagagcggcatcaagtgaggcgcgcgccccggcaccctgcctcgcctccgcctcccctcccctggggccctcccaggtgtcccacactcagtgtgactccctctccacctctagggtacggctgcagctctaccggactgccaagatgggctggggggtccgagccttgcagaccatcccccagggcacgttcatctgcgagtaagttcactgtgaggccgtggtgcatgagggctctgctgaccctagagctccatgtcaggatacatgtctctgctcgcccaccgagtgtatttccaaacatcatgtcccccctttacctgcacgctgcctagatggagcatgcctgtggcagacagatctgtaaagtggagaatagctttttcctgtgcacttcctcccctctgccgtcagactcacctaggttctctgtggcctttagagcagagaagccccttcacctgctccgaggacctcccagtttctctgttccctcaacttctcagacacccacttctcttgggcaattcctcttccagccacatggggcgacctcatgactgatgtagctgcgcagagcctaccacctgtttgatagttcctggtgcacacacctcctaatgtctaagcctggcaactttccacccagccagccaccagggatgctaatccccagaacacaggctcacacacacacacacacacacacacacacacacacacgtcatctcccaccatgcctgctcaggtcttgcaggctccacctgtacagagcctcccacctgcctgtctacagctgcacagcgacccctagtggctggaccatgtcctgcatctctcccctgggctctgagaactgagtgggaaggtggggccgggagccctgctcactgttcatgcagaactgaagtttccgtccaacaggtatgtaggagagctgatctctgatgccgaggctgatgtgagagaggatgattcttacctcttcgatttagataacaaggtgggatgcagcacctctgccctcaactaccaaaggctgctttgtgcagccacctgtaacatctgggactggaagcctgggtggagggactgggtgtcactgcaggaacactagccaggcaagtggatagaagtggatattaagaacactgtgtctccacccccaggatggcgaggtttactgcattgatgcccgttactatggcaacatcagccgattcattaaccacctgtgtgaccccaacatcatccctgtccgggttttcatgctgcaccaagatctacggttcccacgcattgccttcttcagctccagggacatccggactggggaggagctggggtgaggagccagcctgagggcactgaccagcctttggtgttcttttttttttttttttttttttcccggtttttcgggacagggtttctctgtgtagtcctggctgtcctggaactcactctgtagaccaggctggcctcgaactcagaaatctgcctgcctctgcctcccaagtgctgggattaaaggtgtgtgctaccatacccggcttcctttggtgttcttaggtgtcccttggaaggcttgttaaaactgtgtaaggcaggagtaggaacatacattcatgatcacagcactcaggaggctgaggcaggaggatcacaaagagtctgggctacagagtgagaccctgtgtcaaaacaaaacaagagaagtccaggttgccctggtatcacatgcctgtcatgctagtgtttgaaagagcttgaagcagaagtacctacaaattcaaggccagcctgggctaactacagagttcaggacagccaggcctatgtagagagaccctatcttaagcaaaaaacaagaagggggatgggggctagtgtgggttggctggatggttgagtatactaggccctgggcaggctgcatcccacttcccgcagagcctcgggagagtctggtcacaaggcaggaaggctagaagcctgcatttatgacagttctctgggagtgtgagtcaacagagccaacaaggacctggagtccatctgcaggagtggttgggtggaagaaggtggatccctcaagagggctcctgggctctatgagatgggtttgaagtgtctagatccaagggccaagagctcctgtgtttcctctgccagctttgactacggtgaccgattctgggacatcaagagcaagtatttcacctgccagtgtggctctgagaagtgcaagcattcagcggaggccatcgccctggagcagagccgcctggcccggctggacccccacccggagctgctccctgacctcagctccctgccccccatcaacacctgaggactcttaaaatccaggccgggcactgcccttcagacatttctccatcagagaccccagtaaggcctggaaggtcgatggcccctctcccagagctggtttctcactgggagtgcaagtgacttcagggctggccttccccactgagcctggcctcagttagctgattgaagttgggcctctgccagctgattttctgtgttctcaataaatgttgggtttggtaataaactgtctggtgattgtttcaggacgatgaggactatggggctgaggggacagttgggtaggaagcaagctgtggctgtggggtggaagagaacagctgtggggcacccactggccacaggggtttaaggaaaagcaaatcacaacctagaggtttgggtgtgccacagttgaagtactctaaacaattatgcagtgtttccttatcaaagtgctccggtttcttcctgctgcggtccgtagcagacccggtaagcagctcctgggacccagttctgagccctggtacccctgggctggtcaagagttgagatctgaaaaaggaactgtagaggaccacaggcaggggcggggctgtgacgtctgggagggagggcggggcgggcggcaggtgagcggctaggtctccgtggctccaatcactccggagactgagccatggggagaaagcagaatgagaacgaggctcacggtaaggctaggggcagaggcccgggctctggagagaggtggccgggctctgcagccatggcagctgaggttggatcctgacagaggaactggagtcctgggtctctgaggagcggctacaggaaaacaggagtcaaggaaaagagacagaatcaggtcctggaaggatggtctgagccgccagaaagatcttgcatactaaatggaacctggatgagcaggagttggggctggcgtccctgtgtggccagcggagtggggaggtcaggcctgggctgtaggtccctgagggcagagccctagcaaacaaagcctgtgtggttaggaggcaggttagggtcccgatgctctggacttagagtccagcagtgtcctgcgctgtggttgctgggggggggggtgtctgtcaacccacaccctgtgaagaggcaggagctgagactcctgttgggatctgtgtgaagagttggggagatgggcctctgaactaataaagtcctttgaggagtagggggctggaaccccaaacttctgcagtcagcctgctaggattcctgtgaaatggagggcctgggaccctgagctgctggggtctgcatgctagagtcccagaggggggggggcaggtaccgtggactaaaggaattcttgtgagaatttggggtgggaccccgagatgctagggtctgcctgcaaggacccctgtgaggagtggggcctaaggtggagagacaactgacacctgccttcaggtttcagttgggaagaagtgtgtatgttggtgtatctagagcactttaagtaatcggggccagggctgtgtggaaggggaggtctgaggggaaacaggggaggcctgtttccagaactgctgaagtaaagggctggaaatctttcccccagatcctgagactggacggggaagagagagggctgagggttgggcctcctctaggtggggctggtgtcccctagaagaccgagtaatagccagagcacagaaaacttcctggaacagccttgggtcaatcattgaccctgtgtctgtgagcccgggtgggacagagtccaaaatgcccacaaaagaagatacctgccccaggctagcccacccctcagctgtccctcagtgcccaccaggaccctggcagcctggccccgccctgccccgccccctcccctgtgtactcaaggaggaccaggaacaggacgtggccacaaggccacaaccacagcagccggctcaggtgtcaatctggctggccacccagagccgtgcggtagccggagtggggtggtggtggtggggcggtcttcggagctcccattgccctgcagggtttcatagctttactatcctttctttgtcatatccttgggccagagggctgagataagtgatgatggtcccctgaggggctcccagactggatagtccagagatgacttggaacaggctggaggacagagataggactggggtctgcgagccactaagagggagtcccagaacctgggttacacactactcagaagccttgagtccctttaagaaccactttcagaagcttattctaaaaaccagtcaggaggctgaagcaagtttaagtccagcttggagaactcagcaagatcttgtctgaaatacaaagtaaaatttaaaacaaatggctgcggcctggagacacatgcctttaatcccaacacctgggagacagagccaggcagatctctgtgagttcaaggccagcctgggctacagagatagttccaagaagctaaaactttacaaagaaaccctgtctccaaaaaaaaaaaaaaaaagtaaataaataaataaaatagttggctgtggttacagtttagtggcagagcacttgcctcccatgtaagaaaccatagatttgatatctaagattgccaaaaataaaggccccacctcccagctgttgcccagtagcagtcacaagctggcaaccatggggctgctctctgaccaggatactgctaatccaggtccagtcctgttagtgagctagacaggcgcctgggaccattgagtgtctgagagcgactggatgtgggggaagagaccctcaatgccttattctctactcccccctccagggaattcggccaaatatgacccctcctttcgaggccccatcaaaaacaggtgagctacgggcagtggccccgagagatgtggggaggatttggtttaatgcaagaacctggtcccctgaggcatctgtgttgtctagaaggacttgaggggactcggggtactgggtcactctacttctggacttgggtgctagctactcaggtgtgtgtatatgtgaggaaaagaagcaactgcacatgatctctctctctctctctctctatgtatgtatgtatgtttgttattatctgtgcaatatttcagcagaagaattctcatcctaaaaagaggtttcttaaagtagataaagaatgtctatcttgccagacagtagtggtgggcatcttcaatcccagcactttaattccaggcaaaggcagatggatctgagttcaaggccagagtgagttctggtctatagagtgagttccaggacagccagggttacacagagaaaccttatctggaaaaacaaaaatctgaactaaactaaacaacaacaacaaaaagaatgccgatctttctagcattctccaatcctctaaacactaacccacccctcaaaccacacctcccaactccccactccatgattacacatgccgtagctcagacgtgcgtctctccccaggggctgcacagacatcatctgctgtgtcctcttcctgatcttcattttgggttacatcatagtggggcttgtgggtaagtttctagctacccagagctgggaccgagggtgaggacagaaacccaaggagggattaccccatagctgccagcccccaagtctctgccttcctgtgatcctgttgtgcccctgtctccagcctgggtgtatggagaccctcggcaagtgctctaccccagaaactccacgggggcctactgcggcgtgggcgacaacaagtgagtagcagatagcaggatggggggtgggacagcctctgtctctctgaactcaagcatttccgggtcacaccaagacccttccttgtccagccttcccaggactggggacggtgcggagccagttgaagtgcttaagtttagagttcagacttcactgtgagtctccacctgagataagtttggattgtgtgaccttgagcaacttactcagcctctctgagcttaaacttcctcaactgaacatctgagtccttccagaggcatgcaggaaatgcggggtaaataataaggcgctaacagttacaatgctctaggaaggcggggtgcctcacacccaaactgctaagcctcctgaggtagatactgtcattcataagagacagatgtaaggccttgttaaaggccataaagctaccttgctagagggttgtgttccagaaccaatactgtcagccgcacattggcgttgtatcgtgagtaccccaggggttctgggtcttccttatcttcccggagaagctgggccaggaactggatgtacctaatctggcccaagtgctatctctatgctaagagaatgacaccctgtacctgccccggccctcgggccctcaggcacacacatcctctcttcctacagggataaaccctacgttctatacttcgacatcttaagctgtgcggcagctatcaacatcatctccatcgctgagaatggcctacagtgccccacaccccaggtcagaagccaggacctgcctgagccctacccatccccaaggccctgggtactaggcccttagcatgttctctacccacaggtgtgcgtctcttcctgcccactggccccatgggctgtggaggtgttccagttctcaaagacagtcggtgaagtttatggtgaaaggagaaacttttgtcttccagcggtgtccccagatatggtaaatgctggtacccgtgccatcactgttgcgggagaggacccatagtggtaggagaggtggaggtttggctccaaggaaggatggaccagtctgagccttgatgtggtagaagttgtggaaggtgaggtagtggtagtgatggtagtgatgatggtggaggtgatggtgatggtggtggtaggagatagtggtaatgatgatggtggtgataatggtcttagttatgatgctgggagccacagcttcctcgttctgttctatatctgtgcctctgtctgttcttctctctccatccccagatagtggaggagagcctgcagaagggactctgtccccgtttccttcttccttctactccaggtaaggaccatgtacactcccccacctcgggcatcaacccagccaatattttcatttctcaaacaaaggaagcaggcccagaaaaagagaagccactcagcatgtcagtgggtactcagaagtgaacagcaggtcttcatccccctgcctcaggaccctagagtcagactcttggtgtccgctgtgaggctgtgcaccaggtgctggggacagatgcagggaccactccctgctccagctacactctaggtgtagagttcagagatacaagaggttgaatgagcagactagatggtgcagtcctataattccagctgatagggcagctgaggcaggaggatagatgtagaaggacagcctgggtcacttatcgagatcctatctcagtacaataataaaacagggctgatgcagttgtgtcacgtaaaggtgtttaccgccaagtcttacagcctgagttcgaatcccaggtatggtaggagagactgcaatcctaaaacaagctctctaacgaccacaagcattgcacaacccacacacattcacaccccataaatagatgtcatagtgttttgtttcttaaggaaggtgagtgagtggcaggcatgcagagcttgtgcaatgctctgcgttccattgtcagcaaagacagatcataacaaaagtaacagaaaacatccacggatatcaggaaagtgtggagccggagaggccctccgcagtcaggagttactgcttgctcttatatggattcccagaacccacagagcagctcaaaactacctgtaaaccatgcaggcgctttgacacgctcttctggcctccacaggcacaagttacgctgatgctcatacgcactggtgggcaaagcattcacacacatagaataaaagcctttagtttcagctctcaggaagcagtgtcaggaggatggatctctatgaattcaaggccagcctgattcacatagtgagttccaggccagccaaggctctacatagtaaaccctaaaccctgcctcaaaaataaaacagaatagataaatcttttaatttttttaaaacaatatgaatgaatgaatctgagggtaatatagcaagcagagatatctttccaaatgtgtacgtggctgcgtaagccaatcacgatcaacctttctgtggcatacacttcttcccaactacggatgtaaccggtttggtttatttaaagatagaatcttactcagtagcccagctggctccagactagtgatcttccagcctcagcctgaccccgtgctgaaatgacagatagagaccgccattcacctgcctttatctctcctattttgtttttttggcagaaaatatgtttatattttggcatgagaaaggacaagttttcaaggcaagtaggatagaaaaggcacccgggggtggctccaaagcagacagatgtgggtttaaactcgagcactttacagcggacgggtctcaggccagctactcggcctttctgggtttgttttctcaacactgggatgtcagtgataaaaacaaaccagcctggccgcatgtggttccaaagccccataacaggcccagctagagatgcagagatgttaagatggctcagtgggtaagagcactgactgctcttccaaaggtcctgagttcaaatcccaacaactgcatggtggctcacaaccatctgtaatggggtctgacgtcctcttctggtgtgtctgaagacagctacagtgtacttatttataataatatctcttttttaaaaatgagagagatggagagatagatggggcaagggctgggctgaggctgagagcagcctctgaaagagagcaagagcagaggtgtagaaagtgcatagaatccagggcctggaagcatggcccagggacaggacagagccgagggactgaggacgggagcagtggaatgaggagaccatagctgtcctgatcttagcgaggtcagggctggaggtattgcaggaatccaggtaatgaggtgcgaagatgtttggccagtgctagggagagaatacaggctgagaaagagcagagcccatccacagttacccccatacatcctggcagcgttctcagacaggagggtcagatagactcccacccagcagcctgttctcccttccagctctgggacgttgtttcccactccccaacatcaacttcacgttacctgaagacttacggatcaataacaccaccgtctctaatggcatcaggtagatgtcaccctctgtatcatcctcgtgtccctgtgtcccttcttacccatctgactccacccctccccgacagtggcctcctggacagcatcaatgcccgggatgtctctgtgaagatctttgaagattttgcccagtcctggtactggattctcgtgtgagtccatggcttccccaggatcagccaccaccctctgtccttcctgatatctttccccaagtctacatgtgaactgatcagagggcagggctagctcagagtggatcctcagcctcttagaagatgagtcgaatctacgaatacctgtgggtgcaaggaaagaaacctagggcacgaggggacccctcatgtatgttccttacatgcagagcgctgggtgtggccctggcactaagtctgctgttcatcctcctcctgcgcctggtggcggcacccctggtgctgctgctgattgtcggggtgctcgctgtgctcgcctatggcatctaccactgctggcaacagtaccaagtgtttcgggacaagggcgcctccatcacccaactgggcttcactaccaacttcagtgcctaccagagtgtgaaggagacttggctggctgcttgtgagtcccctgcccagctcctctgtccactggtcccctagggttgggtgaccctggcccttacccgggactgcctgccacctgctgtctccatgcagtgattgtcctggctgtcctggagggcatcttgttgcttatgctcattttcctgcgccagaggatccggatcgccatcgctctgctgaaggaagccagcaggtcagggcctgcctgtgagggggaggggaccttggccaggggtgctggcctgggtggggtaataggaacctaagaggagaaaggtagaaatggccaatgggtaacactgctaaattccagccttgtttatttgtttgtttgtttgtttgtttatgtagtgtgggggaagtgggtgtgttgagacagcctttgtctgtgcagccctggctgcccttggaactcattgtgtagaccagactggcctccagctcatagaaacccatctgcctctgcctcccaagtgctaggattaaaggtgcgtgttaccactatcaagagagttctagcctcttaggccctcagtttccctgtctggtttgtttcattgtccttgggaggaggtgagatttatttatttgtgttctatgtatgggtgtttggccagaatgcatgtctgcgcacacgcctggtccctgtggaggtcaggaggagaggaactggagttacagacagttgtgtgcctccacgtggattctgggaactgagctcaagtcctgtgggagaacagccagtgctcttcttaactgtggagccatctctccagccccaaggggttttgttttgttttgtttttgagacaggaacttatatagcctaaacgaatatcatggagcagctatgtaactgaggctgacctccaactctgggtcttcctgccccacaagatggtgatgatacagggtctcaggaagcacaggctgacctcactgtacagttgaagatgaccttaaacatatccttctacacctacctccagaatgctagggatatgggcatgtaccaccaggcttcttttatgctggggtgggggatctagctcagggtctcctgtgttaggcacaccctcctctgtcatcatacccaactcctgtcactcttgcaacataacccagactggtctcagactggtgacaaccctactttctcagcctctcgggtactggaattgaagtatgttcaccaccctcagactccctatcacagcagtctaaaccttgcaatggcacggtgaggactgcatgcgtgggtgtggactaagcacaggactctggaagcactgggagctgaggtgctcgctgggtcaaggggtgggaattgagataggaggagcagagatttccaaagccaccagggggcacacctttcgggggttctcttcccttacactccctgagtgtcccaggtgtcttctgtgactccagtctcccctatgggtcccttgagccttactcggttcacccagcaagagcctatagtgtatccctcctggaatcaggcgctgggtttattgatatggaagaggaaagctgtagttctgtttgtggtctggaaaacaaacaggcccgaggaagggtccagccatggtcagacctgggagcggatgcacagctctggggtcccagatgactactcttgtcttcatacagggctgtggggcagatgatgtcaactatgttctaccctctggtcaccttcgtcctcctggtcatttgcattggttactgggccgtgacagctctgtatcctttatacagctcccactagagagctctcaggggacagggtgtgggtagggacatgggacaggccccatgaggggatgtgacagaactgtattgcaagagtgagtttgggttgaatgccaaccctctgtgggagtgaacaatctgcatgagtcccaggggcagcatttaggggtgtcctgtagtggacggctggcattgtgcttttcttgactcatctctggatacctggccacatccgggcaaccccagtacatctactgggcgtccaacaccagtacaccgggctgtgagaacgttcctgtgaacatgacttgtgacccgatggtgagagggaatagggtgggtgctgagggggtcttgggggtcagttagcacagattttcgctagtgcacaaatacccgagagggccaggactctcacatgggtgaggcctcccttagttcgatagtctagttacccaatttgtggaaagtgaggtggagactggaaacgcaaagtaaagctggggaggttgaatatcaagtagaacctctctctgcctccaaggccattactagctcctcctccttgtcctgtggctcctcccactgctctataaatcggagctgatcctaatcctgtctcagaggtcctttaggagtttttatggcattaggtacatctagcgctgagcagaatgcccgtccactgatagagagccaagctggctggacttttccttttcattcacgtcctgggaacggagccccagacagtggccctgggaagtccacaggagggcctcctggaggaactgggaggcctgttggtacttcccagcacttgagaggtggaggatcaggcttcaacaccagtctctgtcacgcagctagtttgaggccagcctgagctacgtgacgccatctctaagaagcatagccaaaaaaaaaaaaaaaaaaaaaaaaaaaaaagccgctaatttcagcatcctgaaggttaagagtggtgattttaaattcaaggccaccctgggttacataaggaaactgtacctcaaaaaaccctacatacaaaaaagagaaggaaccactgcctggctttatttcaaacatcctcatacattcagaaaccatgaagcttttaaagtcatattttctgcatttatttagtttttaattgctcattttctgtgtgttgttatggagaattccaaacatatgcagaagtaacggtaggtcttgatttcctgaagccctcagcttcctgtaagaacgttcctcctcctttccctcttcctctttgcaaagttagaatttgagcccaaggcctcaggcatgagctacatccctaaccatccccggggcttaaactttaccttcctgccttcatctgtaactttttttctagagttctggtgaatcctagataaattctccattactgagctacatccccagcttctagaagttaaaaagggttttcttggggctggagagatggctcagcggttaagagcactgactgctcttgtgaaggttctgagttcaaatcccagcaaccacatggtggctcacagccatctgtaatgagatctgacgccctcttcaggtgtgtctgaagacagctacggtgtacttacatataataataaataaatctttaaaagaaaaaaaaaagctttaaaaaaaaggttttcagccgggcggatttctgagttccaggacaacctggtctacagagtgagttccaggacagccagggcgatacagagaaaccctgtcttgaaaaagccaaagggaaaaaaaaaggtttttcttccccacctcttttaaaatttttatatcttttattatttcattatttcatgcactttattattattttattttgtgcatacaggtgtctggcctacatgtatgtctatgcttagcattgtatttgctatctaaagaggccagaagagggcatcatatctcctggaactagagttatagatagtggtgagccatcacgtgggtgctgggaacggacctctggttctcttacaagagcagccagaggcatgccatagctggcttgcttttctttttctttcttcctcttctcctctttctttctttctttctttctttctttctttctttctttctttctttctttccaggctgacctgaaatgtattctgtagcccatactggcttcaaattcatggtgatctctctgcctcagtttccttaagtatcgggatcacaaggatgtcttagttaaggttttactgctgtgaagagacagcatgaccaaggcaactcttacaagaacaacatttaattggggctggcttacaggttcagaggttcagttcattatcatcaaggcaggagcatggcagcatccaggcaggcatggtccaggaagagctgagagttctccatcttcatctgaaggctgctagcagaatactgactcccaggcagctaggatgagagtccatacccacagtgatacaagtactccaacaagaccacaccttctgatagtgtcactccctgggccaggcatattcagaccatcctaagaagtaaagtaccacatagcacataggtagtctaaatacaaactgcaccataccacttaacatgtaaataagggaggtctttttgttttgttttaaagattgtatgtgagtacactgttgctgtcttcagacacaccagaagagggcttcagatcccattaccgatggttgtgagccaccacgtagttgctgggaattgaactcaggacctctggaagagcagtcagtgctcttaaccgctgagccatctcttcagtctaataaggtggatctcagacagcattttcttgcttgcttgtttgtttatctattcatagacagggtctgatgtagcccaggctggcttgaaacttgctgtgtggccaagaatgatcttgaacttctgatcctcctgtctctcccttccatgtgctgtgacgacaggtgtgccccaaagtgcagtttttcaaaagtgacctgtgtacattggtgttgtgactgtgtgtatgtcaatgtgaggttgtcagatgcccggggattggaattacagacctaccatgtgggtgctgggaattgaacctggttcactttggaagaatagccagtgctcttaaccgctgagtcatctctccagtccccactcagggtttgatgtggtggctttgtgcatggtaggcaagtactctatcagctgatatccttccccagcccctcaacagatcgctcagaaagcaggacagtgataaaaagttgtcttttgttcctgaagccccgagttctacactagaaatggggaggaaaggcggctgcaggggtggaggtgggcataaggataatgaaagcagggcatgaggctcaattttgtgtgtgagttttgtaggatgtgtgagatttggtgttcggtcccagcaaagcaaatgcatacacacacataccacacacacacatataacacaaactctcacacacaaacacaaatatgtaccacacactcatacccacacataccacacccacatacatgtaccacacatacatacacacatacaacacactcacacatgtaccacacatagatattcacatacaacacatgcacacatataccacacacatacatgtaccacacacacatacacacacacacatacatgcactgcacacacacacacacattccacagacatgtacacacatacagacaagcacatacatacagatacacacatgcatacacttacacatgcatgcatcacatgcgtgtgcacacacacatcacagacacatgcacacagacacacacacatgcatgctataactgtgtcattgttagagcccacaaagtcagtttaatatcaataaatacccacagtgtgttcagtgcacacaaggcttttccagaagcaggctgctgggaaagtaagagggagagggggtggaaaacatccacgcacgcacctcgcttgccttctggatagcttgtgccagtctggaaaccaggaagctgcttagtcacactacagcagcactgaggtggtctgagtctggaggccactaggaacagagaaggtcaaggatttgcctgcaactccgggcatgaacctgctatgtcctgtcacccccaggccccgttgaattcctcgtgcccaaacctcaagtgcgtcttcaagggctactcgaccacgggcctagctcagcgttctctcttcaacctgcaaatctacggagtcctggggctcttctggactgttaactgggtactggccctgggccagtgtgtccttgccggggccttcgcctctttctactgggcctttcacaagcctcgagacatccctaccttccctttgagctcagccttcatccgcacactccggtaagccaggggcagccgcctagggaagtgttagtcctagagataccaggggtcctggggtgcctcatctcacctaactaactgcctctgcagttaccacactggctcactggcgtttggagccctcatcctgtcccttgtgcagatagcccgggttatcctggagtatatcgaccacaagctaagaggtgagcaggtggtgggctgagcagccagagccttggaagggcaggcagacaggcagaagctggcggctaagcgtgagcttcctttgtccccaggatcccagaaccctgtggcccgctgcatcatctgctgcttcaagtgttgcctctggtgtctggagaagtttattaagttcctcaaccgcaatgcctacatcatggtgagcaaaacctccatccgtccctggctctgtgtccctcagcccgggctccaccatcactcgggcaagctcaccagaggtgtggctcagaccttccctgctcctcacagatcgccatctatggaaagaatttttgtgtctcggccaaaaatgccttcatgctgctcatgaggaatgttctcaggtcagaccgccatgccccagtggggtctcccacccacttctcccatcccaaagctggtctcagaaatgtcctgtgcttggtccagtaccatgccatcacctgccagcaccctcaccccagtctgtcctgacttctatgtagggtcgtcgtcctggataaagtcactgatctgctgctgttctttgggaagctgctggtggttggaggtgtcggtaagggtcaagaccagggtttacggggtcaggtgccccctggggtgcacgaagggggggtcctcagaagaacagcactgaccgcaggactctttcccacaggcgttctgtccttcttctttttctccggtcgtatcaaggggctggggaaagactttgagaaccccaacctcaactattattggctgcccatcatggtgagtgacacctctctctgccccacccacatccccagaggagcctagggctcccaatcagtcttgtctcttgcagacctccatcatgggagcctacgtcattgccagtggcttcttcagcgtctttggaatgtgtgtagatacgctcttcctctgcttccgtgagtgcccccctcccccaaccctccacccaccctcaagctcttaggcctccaggcttcttttagagactggttgcttgtagctttgtgagctaaaggagccagagggaatgtcttcagacattctaaggctagaggtttaggaaggaaagaagggaatacaccctgggcattctcagacaggggaaacttctcagacggaggcctgagtttaacacttcctaggaggtagtcagagtgtgtggtttttacttaggtttttttttttgggggggggggtcatgcataggggtgagacaggaacagactatagtacagactgacccggaactaagtctatagctaaggctgactcaaagtcatgatcttcctacctcagcccccaagtgctggaattcttgtgttttttgacctggtgacaatggtgaccatgatatagaagccagagccttgggcctgagaagcaggaatggccctacctcggtagcagtcccccagccatgcactaagcagtggacatgaatattttattgttttatgggttttgcttgttgcttcaattttatttatttacatcaggcctctctatgtattcttggctagctcctactatatagactaggctagatctaactcaaaccaatctcctggcctttgcctcccaagcaatagaatcatggatatgcgcaaccattctcaagacagagttgtgctgtggagacctcaggggcctttgtagtctaagtcctcccatgtccacattctaaatgtcgggattacagagaaagccaccatgatggtctggcatgtgatttttttttttttttgtcttgttatcaccctatgacatatacagttatttatcccactttgtgtgagaaaaacaggttatacagcctggtctacagccagccagggaagttgtatcaaactgcctgaagtggcccggacaggaaaccaggatgtttggtttatacaccccagattattttggggtacagtggggtgccattatcaggatccaccctgacggatctactttgcctctcagtcgaggacctggagagaaatgatggttcccaggagcggccttactacatgcccaaggcactcctgaagattctgggcaagaagaatgaggcacctacagggggaaagaccaggaagaagtgagagactcatcgtgacctggaaatgcagccctcctgtacagaagccctgccgtcaatgccttgagaatcacgattttgtagaaaacagattttattaaagactaatattttatattcttgataagtttatggctttattttcagtgaaaacttgcttccttttttttttttttaattaaaatccaaattgctatcacacgattcaatacccagtaagaaaaacttgttcggtgactgaggccaggagactggggtgtaactcagctggtagagtttgcctagcatggaagggtccccggattctgtctatagcataagcagggctgggacacatgcctgtaatcggtacttgggaggtacaggcaggagcactggaatttccaagttatctgtgtctgtttagagacagaatttttctgtgtagccctggctatcctagaactcactctgtagaccaggctggcttagaactcaggaaggagggtggctcttttttcattcattcgtcgctttttttttttttttttttttttagcttttcaagacagggtttctctgtgtagcccaggctggcctcgaactcagaaatttgcctgcctctacctctgcctcccaagtgctgggattaaaggcgtgcgccaccacgcccagctgcttattatttttaacctagtgattctaatcagtgttagtcatgtgcttaagggcattggggtcatccactgggacgtggggtaccatgggcacactcctaaagaaaagtgcctttctctcccctagcagccatcaactgccaagatctcctcagctaggagtggggcttcccaaccctagggactcatacaaactaggaaggtactctaccaactgagtcatatgccatccctaacctgtctcttccacaaggggtcagtgcctttcatagccgccggttgctttaaaacacgccccgcccctttcgtcacgttctggcgttagagccagtcaaaaggctcacacagactggggccgcctctgggtcacatgctgatggactaattggagtcgcggcagcgcgggctgcggcccccaaggggaggggtcggagtgacgtgcgcgcttttaaagggccgaggtcagctgacggcttgccaccggtgaccagttcctggacagggatcgccgggagctatggtgggggcagacccgaccagaccccggggaccgctgagctattgggcgggccgtcggggtcaggggctcgcagcgatcttcctgctcctggtgtccgcggcggaatccgaggccagggcagaggatgacttcagcctggtgagccttgctgcacctgcagaggtggccactgcccagctcggccatccctccgcgtgacactcctgcccctccatcccctcccaacacctttgcttccttgggcccctggctcaactgttatggggtcctgcccctcatccctgaaggttccttctcccctcgcagcctctccttgctcaggagcctccaggttcggcccatactatcctctgggctcccacctcttgttctaggacacccttcacccctactcaggctccccattaccctctctcatgggaaccctggctggagccagtacctatcggtcttaggtaccttaaacctcgtgaagcttgtctgcattgaggtgtccttctgcgcaggtgcagccgctggtgaccatggagcagctgctgtgggtgagcgggaagcagatcggctctgtagacactttccgcatcccgctcatcacagccacccctcggggcacgctcctggccttcgctgaggccaggaaaaaatctgcatccgatgagggggccaagttcatcgccatgaggaggtccacggaccagggtaacaaaggctcccgggtggaaagagcgggtgctgggttgtatgggtgatcggggtagggagttgggggttcccttcatcaatggagcagagccgagcagaccccggggaccactgagctgctgggctggttggggtcaggggctcacagcgatcttcctgctcctggcatccgaggccagggcagaggatgacttcagcccagagatagaactttggggcttgagtccctaatgagttagggaaaccagaggatgaattttgtccatagtttctgtaactaagaaccaaggtactgaaaatgagaattatgtctcaggggaattagcaggaaataatgtcagagaaagaagaaacatggttctggtgccacattgaggtccccggggagaggcaggaagtaaacaacaacccgtacaattttctctctgctcttttttttttcttcttcttctaggtagcacgtggtcctctacagccttcatcgtagacgatggggaggcctccgatggcctgaacctgggcgctgtggtgaacgatgtagacacagggatagtgttccttatctataccctctgtgctcacaaggtcaactgccaggtggcctctaccatgttggtttggagtaaggacgacggcatttcctggagcccaccccggaatctctctgtggatattggcacagagatgtttgcccctggacctggctcaggcattcaggtttcaccctgtggataggaggagggcaagatcccatgaatcagattttttttcctgagtgggggcaccttagaaggatggcgttctggaagtttccatctcgattgtggagatggaactaccattgacgtctcacatggagactgtcaacagatctgtccttagcctgtgcagggaagaattgggtgccattgggcagacacgtacctatatcacaatgcccggtgcccagcagggtccatgagctcaggttagagagacgttcccaaggctgggtggacacctgcacttgtccagtggtgcattccacatgcatgtcctaagggacttccaggaaagggcagtggagagggtgtaagaaccaagcatgatctgtttatatgtttggacatgccatggtgaagcccatttctttgtatgctagccaaaaatttatttgagaacaaaaaaactaaggcaagaaaatcactgtgagttaaaggctagcctgggctacattgtaagttcaaagacaggctacctagagagataatctcaaaatggggaggaggactgaaaagatagtattgaaattggggacatttgcagccctcaggaggccagggcaggcagatctctgagttcaaggctagcctagtctacagagagcattcaggctactcacaagtaaccctgtgtagcatgcctacagttccagcatcaggcaatagaatgaggaggactgggagccaaatagtcagccttggctacatagagcattggaggccattgttattcaaataaatatttcgaatttagagagagatttttttcttttctattttttaagatttttgaggagtgtcattcaatgagggccttgtgcacaggcagcaagaactctaccaccaagctgagctatacctcagcctttttatatacttttaattttgagacagagtctcactatgtccccaggttagccttgaagtgactctgtagcccaggcaaaccatcttctgtgctcagcctcctgagtagctgggattacaggcctgccatgaaaaagcttcttaatttgggcagtgtctgtgggagaacaaaagggttccagtgtgtcgcactgggagctgccagcgctctgcctgagctccatggcagcacctttgcgacacccacttcctcttcttaacagaaacagcgggagcctgggaagggccggctcattgtgtgtggacacgggacgctggagcgagatggggtcttctgtctcctcagtgatgaccacggtgcctcctggcactacggcactggagtgagcggcattccctttggccagcccaaacacgatcacgatttcaaccccgacgagtgccaggtcaggagtccatggactgtacccgcccacaccaccgccttccccagctctggcttcctcagcctccccagcttctcctgttctctcccccacgcagccctacgagcttccagatggctcggtcatcatcaacgcccggaaccagaataactaccattgccgctgcaggatcgtcctccgcagctatgacgcctgtgacaccctcaggccccgggatgtgaccttcgaccctgagctcgtggaccctgtggtagctgcaggagcactagccaccagctccggcattgtcttcttctccaatccagcccaccctgagttccgtgagtgcctgagggtggagtgggggttggggggcgccccgtctgaacaagtcctggacagagcagagaccctcctccctctgactattgctctcctaggagtgaacctgaccctgcgctggagtttcagcaatggtacatcctggcagaaggagagggtccaggtgtggccgggacccagcggctactcgtccctgacagccctggaaaacagcacggatggaaagaagcagcccccgcagctgttcgttctgtacgagaaaggcctgaaccggtacaccgagagcatctccatggtcaaaatcagcgtctacggcacgctctgagccccgtgcccaaaggacaccaagtcctggtcgctgacttcacagctctctggaccatctgcagagggtgcctgaaacacagctcttcctctgaactctgaccttttgcaacttctcatcaacagggaagtctcttcgttatgacttaacacccagcttcctctcggggcaggaagtccctccgtcaccaagagcacttttttccagtatgctggggatggcccctgtccattctcttccaggacaacggagctgtgcctttctgggacaggatgggggaggggctccccctggagagatgaacagatacgaactcagggaactgagaaggcccggtgtcctagggtacaaaggcaggtactagatgtgattgctgaaagtccccagggcagagtgtcctttcagagcaaggataagcacacctacgtgtgcacctttgattatttatgaatcgaaatatttgtaacttaaaatttttgatgcagaaaaagcgtttgtggagtctgtggttctgtctgctcacgccttcccaattgcctcctggagagacaggaaggcagctggaagaggagccgatgtacttactgggaagcagaaacccctagattccatcctggctgctgctgtttgcaagtgtcaaagatgggggggcgtgtttatattttatatttctaagatggggtggcataggaaatagggaacagatgtgtaaaaccagatgggaaggacagtctgtgagaaaggagcaagcagttgctgcaggtgtgggagagcaaagcccttctccacgtggaaagagcccagatggacgctaagcatgttgggcacctgtaaccccgcactcgctggactgacggtgtagctcagtggtggagctagtacttggaacgcctaagactctgggttcagtccttgggggggggggtatgtgtttattgagaggaaggtgtacgtactgtaggtcagaggacagcttactggagttgtctctctccttcacgctgtgagtcctgtggaatgacctcaggtgtcagagttgggggcaggtgcctttgccagctgagccatcttgctgtctctgctttaatttaaaaaaaaaaaaaaaaaagaatattaaggtctgagggattcgggctgcgttcatttcaattagagggtcatatttcttttgacatttcttctctaagaaatgttaagatcatttgttctgtgtgatagaggtatagctccattgtatgtcagcagtgagggatcctgtgcattttatccagagtttgtacggtgttctaggggctgctagtgcagcccagtgctaaacacttcagcatgcacaaggcctcaatcagtgcatgcatgtgcacacacacacagacacacacgtacacactgacacaggtacacaaatacacactggcccacatgtacacatcgactcacaggtacacagacccactttgacacacatatacacagacacaaacgcactggcacacacatatacacaggcacacatggatagatggacacacgtgtacacatacacacacacacagaaatacaaatgttcaggttttctaaaaaaaaaaaaattagagacgtgttgacttcatttttagcaaaaatcctgtcatgtatcttaaagtggattgaacccactatgtagcccaggctggcctccaaatgggcatccttctgcctcagtctcccgagggctaggataacaggagtatgccatcacacctggctaatagaaattttcaaaattgtttgtttgaaggtgactcttactatattgcctaactgatctccagttcgtgaaatcctcctgcctcagaaccaggactgtcaatataacccaccaagacaggccaacattcacaattgattgttagtttgtggtctgaatcaaggtcttatactgtagcccaggctagcccggaatacacgatatctccagtgcttcagatcctcagttctaactaagcatggccacatccatgtttaactgcaaatttgatgttaccatggtttggtttggtttggtttggtttggtttggtttggtttggttttttggccattttttttttctcatgctgaggccttgtgctctcaagttggggagacagcatggagggtagctgcaactgtaaccccagttccaggggacctgacaccctctggcctccacaagtattaggcacatctgtggtgcacagacatacaatcaggcaaaatattcatacacataaaataaaataatttaaaacaaaagcaaaaatcaggacctaagaaaaaaatctattcctgattcttttatgttttgtttgtattttatcaagacagggttgtttctctgtatagccctggctgtcttggaattcactctgtagaccaggctggcctcaaactcagaaatcctcctgcctttgccttccaagtgctggaattaaaggcatgcgccaccacgctggctttgattgctgattttgccactcttttaatctgtcgcagcctaacctttctgtttgttcagtaggttgcttgatttttgtgccatccagacaaaacagcaggttgtcccgtgggatggcccttgaaggagtcacctaacatctccctccacctctgaaggtttggctgcattcagacacctctttgggagaataggggtgcctcatgttttccatgtgctgcccactgctcccccacgctcgcacagcctgccctccttccgtgtagagactgagcacagggctgaggtggtacagcaatctttgtaaggtttgctggtaaccctcccaaagcagcaatcccatcctgcatgcgttgtctgctaccatatttcatggagttgcaaatgagtggtttttacttttatttcttcctgaaataatttataacctgaaatccttcagttcaaagaaacacacacacacacacacacacacacacacacacacacacagagagagagagagagagagagatgcaaagaatctggatttgactcctagcacccacaaccatgtgtgactttaggacttcagttccagaggatctgatatcctcttctgacctctgtgggcaccaggcacatacatatatacatacatacatacacgcaggtaaaacatttatacacataaaactaaagtaaatctaaagcaaaaatgaagacttcaagaaaaagagagagagccttctctcctctgggctgtctgttagctggtgcacggtctgtacaggaaccacagcctgtgtgggctcgctctcccttaattgagcagttctgagtcagttgatgtaactcattgccctagtcagtaaaccacagtgttgcccaatgggatacatagaaaggcccttccctggcctgcagaggcagacagagggagtgagggaagatgcttgacagtaagacacctagcaggctgatgggttagctcagtacagtgcttgcttagcatgcgtgaggctcaggtacaatgtccagtccctgggctggtggtaattcatgcagatcactaaacagatcactgaacgaggaagaatggaggtcatgaccacagcaattgggacaccagtcccatgactatcgccacccaaaattgcatacctacctgccagtcttttgctttttatatgttgacccaggcctcgttccatagcctgggactcatgcaatcttcctgctcagcttcttgagctgagatcacaggcccagccccaatagtagaattggtgatagcaagattggcccagtggttacttgctatcaaggctgatgacctgagttcaaagctctgagcccacagggtggaaggagaaaactggctctagcaaggtgttctatgaccaccaaacatgccacagcatacctgcacccaccacccctacaaaacaaataaacaaataaatgtgaaactaaacaaaaagaggtagtggaagagagtgagactaggttgtgcctgcctgaaaccccagctcgcagaagatggcagaggcaggaagatcatgaaaacttgaagccagccttgtgtctgtagcaagttccaggctagtcagagctacacagcaataccctgttaatagaaagacagacagtggggctggagagatggcttggaggttaagagcactgactgctcttccaaaggtcctgagttcaaatcccagcaaccacatggtggttcacaaccacctgtaatgagatctgatgtcctcttctggtgcatctgaagacagctacagtgtacttacatataataactaaataaatctttaaaaaaaaattaaaaaaaaaaagaaagacagaatggtcaaaattaaaacacacactcacacatgcatgcatgcaagcatgtacacactcatatgtgtacttacatacactcatgcaggctcactgtacactcaggaggcatgcacacacacacacatagtggagattggaaacgatactcaccgtgcctgcctgtgagcctagtgaagcagaagcagcaggcagccacagagaatgacccatcatcacctgccttcttcaggccaacaaccctgatttccagtacatggtgcttaaagacctcctccttcctgggacaggctctggagcccatggtaaactagaccccttcatcatcacactagaagttcaggagatctagccttggggcccagagtttgcctcctcccactcctcccaccagtgctaggaatggagtctggggtctcactcaggcatgctgtgcaagtgctgaaccactgagccacatacctatccctgggtgcttttattctattttggttaggggacagtgtcacctactgggttactggctatgccacatccaggggataatgtgtatcatggacagatggttccgcagtccatcttaagagcacttgttcttgcagagcaccagcgagtgtggttcctggcatcttcttggtggttcacaactggctgtaactccagttccaggagctctaatgccctcttctgaccccttcaggcacacatgtgtggcacacatgtcagcaagccagtcacatgaatgaataagtaaatctaaaaacattttgaatacatttctgagctgagatggtgtctctgtaagtaaagtgcttatcatacaagcctgaaaacctgaattctgctccagcactcatgtaaaagccagtcatgacgagctggaaaatggtggcacacgcctttaatcccagcacttgggaggtagcacaaagcagatttctgagttcgaggccagcctgttctacagagtgagttccaggacagccagggctgcacagagaaaccctgtgtcttagtcagggtttctattcctgcaccaaacatcatgaccaagatgcaagttgggaggaaagggtttattcagcttccacttccacattgctgttcatcaccacaagaagtcaggactggaactcaagcaggtcaggaagcaggagctgatgcagaggccatggagggatgtttcttactgacttgcttagcttgctttcttatagaactcaagactaccagcccagagatggtaccatccacaaggggcctcccccattgatcactaatcgagaaaatgccttacagctagatctcatggaggcatttcctcaactgaagctcctttctctataactccagcctgtgtcaggttgacacaaaaccaaccagtatgccctgtatagtcaaaaaaccaaaaccaaacaaaaccaaaacagaacaaagacaccaggcctgtcatgagagcaacacataggtactgggaactaaattctggtcctgtggaagagcagccagtgcctataaacctccagccccaagatggtgttttaatgcaatggtttcaaagggcctagagagatgactcagtggttaagagcacttgttactgttgtgatcataaaaagagaaagcgctataagaatatgttctggcacggtgtgggggaaggggatgcgtctgtgggcctatgacaaggcatcccttccccctgagggaccagacacacaccggtatagtatagaatagagtttatttagggcatggagaggggagttaagagggtagcagagaggagaagtaggggccggccatggcctggtggagagaaggaggaagggaatggggagcaagaggtaagagagagagaggaggggccaagcagcctcttttatagggccatgcctacctggctgttgccaggtaactgtggggctggaatttagacagaattccaacagttaatttgccagaggacttgggttttggtttccagcacccacatgatgtccctcaactatctgcaactccagttttagaggaaccaactccatcttctggtctctatgggcaccaggcactcaggtggtacatttagatacaagcagacaaaacattcatagactcaacagagtttaaaaaacaagaagtaaaaacaaaacaaacaaacaaaaaaaaacccaaaacaaacaaacaaacaaaaaaaaaaccccacaagcacctgtgctgggtaaacatcttgtttttttttttttttttttttatttccttgtctttgatttcctgggaaaggaagcagaggccacaggcatgctagttaattgctgcaccactgatcactgggtaagctgctctttatctcggttctgggtgtaacggaaaaggctaactatctaaaaattcacacttgtatgagttggaggctagaagtctcatttcctgtgaccccgaatctttaagcaaagagcctagcggtgtgacagagcttcagacttagtttgaaatctgttggatcagagcccataaaagttacggagtagcagtatggcctccagcaagccggcaggatgatgctccctggagaatctaagctgccccagcaatcggaggcagggtggaaagcgccacagcgagcagcaggaactgtccaagcatgggtctctgaggatgtggtcccaaggttagcaccgtccccctccactgctgaatcaagagcgggaggccagcacttcagcccacctgggtttcagcaaggcatttgtccaataagattaggagaaatgtcctgggccatgtactggggcgggggcggagtgggagagcgagcgagggcaggagtggaggagggggatggggggagaggcaggtcaatggaggctgtgtgaatggctcagtagtgagcagtataaatgggagaggtttggtctcgaattctccagagagggagtaaaattaagcaagtgctgtcttcattttgatttgagataagttgtttacatttcctcattctctctttctttctttctttcctcctttcttcttgggaaagagtttagataagctctaaacctaaatattaacctcaggggctggagagatggctcagaagttaaaagcactggctgctcttccagaggtcctgaattcaaatcccagcaaccacatggtggctcacaacgatccgtaatgagatctgacaccttcttttggtgtgtctgaagacagttacagtatacttacatataaatcatatatttatcatatatatatatatatatatgtatatatatatatatatatatatatgaaatcatatatataccatatatgtatctcaaaactgaaattccctatatagcagaggctggccttaaactcctgatctgatcctttttttttgggggggggggtattgagacagggtttctctatgtagccctggctgtcctagaactcactttgtaaaccaagctggcctcgaactcagaaatccgcctgcctctgcctcccgagtgctgggattaaaggcgtgctccaccacacccagcctgatctgatcttcctacctacagggaataccccacccccacccgaacagtgttctgaagattagctagggcccacactatatcactgagctatatacctcaagtccctttgtatatatttttgagacagggtgtaggtaagtttcccaagctttgaccacactatgtagcccaggctagccttttgtttgcaatacccacaggcctcttagatagctgggcatagttccatgccttcaggcctggctcttcatactatttactgttcatcatcatcatcataaaaaaaaaaaaaaggctaggcaggggcatatggtcaggtggcacacctatgctcaaggccctggattattcaacctcagcacgcaaaaaatgtttcgagtcttctttttatagttgttcagtcctctcagaaaaaaaaaatcaagccagctgagcgagggttctctgagtggtcctgatggaaaatgcccacccgacccagcatccaccgtcacaaggccctttggagctccctcaccactgtgcttgcccctgaagtttaactggggagtgctggcaaacatctccatctcaggcatatttttagattttaatggtttaatgatgggcaataggcattccagaataggcatttccacttgagggtcacctgaccagggacaatgacatctaacattttcagagtcagcatgtactttggactaactggcaataatctgtttccttgttctttgggaaattaacaacaatcaaaagacagccctgtgggagacagccggacaccagcaccagctacctaagacctttcctcaaaacggaaaagcacaacaatagttaaagataactatggggggctccagagatggctcactggttaagagcactgattgctctcccagaggccctgagtcagttcccaacaaccacatggtgggtggctcacagccatctgtaataggatctgatcccctcttctggtgtgtctgaagacagctacagtttggtcatagaaataaataaatttaaagaaaagataattacaggtctggcctgcttagagacactgtccacctccttgggcagagctaaggaccctgcctgtgcctgttggggtggcagcattgtgataaacctgcatggccagaaaagctcccaacaaactgtggctggcacaactgcagaacttgacacttctcttaatgtttttaaggataatttcctttccaagtcattaatgtggcattcagtcaggcttccagttaatctcttcattatgcactttttaaatataatatttccatttattctctgagaattccatacatgcatacaatatagtttgattctatctacatcctgatccaactcagcccagatccccacatgtgcctgcctcccgcttctcctttttttttttttttttttttttttttggttttttgagacagggtttctctgtgtagccctggctgtcctggaactcactctgtagacgtcaaatcctcaaactcagaaatccgctgcctctgcctccagagtgctgggattaaaggtgtgtaccaccactgcccggcttgggcagcacctttttaagagcaacaccttttgggtaggtaaaatggctcagctagtaaaggcatttgcctccacacctgagactttagttcaatccctaagaccctcatggtgggagaagagatctgattgctaatttgtcctctgacttacacaagtgcccatatgaacacacacacacatttgtaggctgattctctataccctaccagccttctgttaccaatagctcctcagctaggtgtggagtcttgtgagtcacttccctgtgtacttatttatattctggaatttctagtcacatttttattcctcccaacccccactgctgggaattgagcccaagacctcccatataagccacacccctgtctcctgatagcaattttaaaagtcattttattttttagattgtgtgtgtgtgtggtatgtgcaatgggtgtgtgcaggtgaattcaggtgtccatggtggccagagacatcagatcatcctttaagaaaaggtcttttataacacagggtggcatagaacttcccatatagcccaggctagcctcgaataaagacaatcctcctgcctcagtctcccaagtgcaggggttacaggttgggggccaccatacctggctgtagtgtgagtttcttaactgtaaaatcatcttttattgtgcctgctggccagcacccctgagaaaggagtctccagtgtgttttactctggctcggctcaaaacagttgtcttccaagagagcagccctttgagaatcaccagccaaagctatgtttttaggcagggcatggtggcaaatgcctgaagtcccagtactctgaaagtagaggcagaaggatcaggagtttgtggacactgtacctcacatagtgaggggctggagagcagttcagtgggccacagctgctcttgcagagaacctgggttcccttcccactgccacatcaatatacccacaaccacctgtaagtccagttccggaggatccgactcccccttctggcctcaatgggcactatacttgtgtggtgacacaatcacacacacacacacacacacacatgtaaaaataaatgtataaagacaaacacaagtcagacatacagaacataaagatgtgtgtgaagcccacccacacccctcagtctgtcatccctcctcccaccccctcatcacattgccatcagtctatcagcagctcaactttgcctggagcacatcacaagcagcttgctcaaaaatgtctcccaaagagcaggagcaagagctggagagatgactcagtggttaagagcactgactgttcttccggaggtccgaagttcaattcccagcaaccacatggtagctcacaaccatctgtagtgagatgtggtgccctcttctggtgtgtctgaaaaacagctacagtgtactcatatatatgaaatgaataaataattcttttttaaaaatgtctaccaacagactgtgcagagccacagtcccacaaacaacctccaagtcagctttattgtcttggctccaggctttcttcacaacctgaatgaaatgactcaaagaccacagtcataggctcgatggtgccctcagaccagggcatgctgccatgtcctcagccccaaatcataaacttttctcaacactgacagaaaagccctgactggcttcctgctcggtgcctggaacagcctggcaggtaagagtcaggtgagaaagcccgcccagccttcctggcgtcggaatgagccatggaagatatatatgcagtaacacagaacaatggtctaaccaggaaccggggaggtagaaccagccaaatggagatctgctaagagtgaaaggtaaacaggtaatagccagccaactgaagggagagagcaaagatgcccagagccacagggaaaggcagtgggtttacgatgcctgtcgtgctcacatagagtaatttgtcctgcagtctggaagggctgttagaagatcttgtcatagaacgtgcctcctgacctggctgaaggacaccaattactacataaccactgctatttatatttttcttttagttgttcgattcttaaaagggagcttgggaagaaagcaagcgccacgtcacccaggctagcccttaaaaatcagtatgcagctgggcgtggtggtgcatgcctttaatcccagcactcaggaggcagaggcaggtggatttctgagttcaaggccagcctggtctacaaagtgagttccaggatagccagggctacacagagaaaccctgtctcaaaaaaccaaaaaaacaaaaaaaaacaaaaaaaacaaaaaaaaaaaccaacagtatgcagccaatgatcttgaacttctggtcctacaggttccaactgtgagtacaagggtcacaggcttgtgtgactgctcctggttttgtgcagggctggggatcaaacctaggactttgtgcatactagacaagcagtctaccaattgagctacattcctgtagtagttgggttctctagaggaacagaacttatagaattataaagagagcatgtatgtatgtatgtatgtatgtatgtatgtacatatatattacatggctcagaactagcttatgccttgaacctggaccagcaccagaaagaaggtctgaccaccccggggtgggggcagtttggaccatggaagcaaggaatgaaaacaagacctttggataaatgaatagttgaccatttacaggaatgattgaccgattaggaggagacgccgatggttagggaagggcagatgaggtactgaataggctttgccactcatactaaatacagtctacgtgctcagccttttgaagatgtgtgtgtgtgtgtgtgtgtgtgtgtgaatattacctatcatattttactctctctgggagtaagaagtatgcttatttgcctattcttgaggggagtgtaacagagtgaccaggtcggtcagagttaagtattctgtatgcctttagaaactttttctactgcttcaactttattttattcatgtaagtgttttgcctgcatgtgtgtctgtgcaccacatgtatttctggtgccacagaggccagaaggggtcggatcctctgcaactggagttgtcatagccagcagatgggagctgggaaccaaatcttctgtaagagcagccagtgctcttaatcactgagccatctctctagcccctctccagaatctttttgttttttttgttttgttttgttttgttttgttttgtttttcaagatagagttcctctgtgtagccctggctgtcctggaactcattctgtagaccaggctggcctcaaactcagagatctgccagccttttcttcctgagtgttgggattgaaggcgtgtgccgccaccacctggcacttctagtcaagtattctaagtgactatatacagtatacacacccatcagagtaagaagtttacatgcgtgcactggctcttcttccagaagacccaggtttaatcggtactactacggatataaatccagttccaggggacctgacgccctcttctggcctctatgggatttccacccgtgtccacattgcagacaaatcctccatagacataaaaacatttttttttctgttttgtttgttttgctttttccttattgttttgagacagggtctcactatgccgctctgtgtgtgcctccttacccagctaaaacattctctcccccctacccccccactcctcacccccagactggctttccctgtgtagccctgactgccccagaactcactctgtagaccaggctggcctgaaaggaactgtttaacaagactggcctttcagaaattcagaaatccgtctgcctctgcctcccaagtgctgggattaaaggcgttgcgccaccactgcctggctaaaacgttcttttatagttgaaagattttaagttgtttgtccttaatcacctgcatctaaataatccagcctaaaacttaacaatttgtttattttattcttatgagcatttgagcattttgcctacatgtgcaccacgtgcatgcctggtgcccagacaaacatggcagcaaaacacccatacacataaaatcgaagcttatttaaaattttaaaaaaagacgatgtcagcgtagtgtccccagcgaccatgaattgccagcagtccttcagggaagaatagtctcctgagcgctctcactccaggccaggacaactaattcttgtgctaccaaccacagcatctgtgaattcatgtgtgcagcggctctgttgtgcccagaaaaaattaaatgtaatttttttttttttttagttaggctatcttgtgtcccatgctggcctcaaactgtgtaactgaggataaccctgatcaccggatgtccttcataatgctgagttacaggcatacattgcctgttacctggtgctgggcactgagccagacacaaacatatttttgagacaagagttcacagttgaggctgtcttcaaactcatctccctgctggagtgcggggaattacaggtgtacaccactaatgtcattagctctctgaaatacttcctgtatgttcttgtaggccagagacctacagctggttaccttcctcatctgcacaccatcttttctccccttgtagccctggctgtcttgaaacttattgagtaggctcctctcaaacttaagagatccatctgcctgtctcccaggtgctgggattaaaggtatatgccaccacagctgggcctactgcacactatctttagaaaaaagatcaaaactctactcctccaagtctttttttcactttcctttgttttctaactcaatggttttgtgtggccattgaaataactacccgggctggtgagatggctcagtgggtaagagcacccgactgctcttccgaaggtccgaagttcaaatcccagcaaccacatggtggctcacaaccatccgtaatgagatctgactccctcttctggaggtctgaagacagctacagtgtacttacatgtaataaataaataaatctttaaaaaaaaaaaaaaaaagaaataactacccactagagcttttttttttttttttttttggtttttcgagacagggtttctctatgtagccttggctgtcctgggactcactttgtagaccaggctggcctggtcagaaatctgcctgcctctgcctcccaagtgctgggattaaaggcatgcgccaccacatccggcccactagagcttttaaatttatttactgtatgtaagtacatggtaactgccttcagacatcgcagaagagggcatcggtgtggtcacgggagattcaaactcaggatcagtcagtgttctcaaccactgagcccccttaaatctacttttctacccccaagtcaagtgctcttacccccaagtcaagtgctctcacgtggctgggaaccctctatgcagtagtgatctctgatccttctgactccacctccaagtgctaggttgcaggtacacctaacccatgagagcttatggcttgctaagcaggcaccaggagtctctggccaagttcattcaccaggcaagcacacctggagtctactggtggggtctccagaaggctggggtgcttgatgctgtcctttaccctctgcagtgggagcttaggggaggggaggccgacttgttcctagcaggtagatctgaccgattcagatgctaatctgctaaaactatggtcagccttacaggtctgtatagaattttcatctgtacttccagaacagatgctgttaagggaccaggaaccagacacatgaaatgactagctccttcctgggcatttgatgtaggcagtcaggtggtgacacctgtgtggtaaggttaaaaccttattcccatatatcttctcacacctccccacaaagtgacacagaaaaagtctatttaagtacttttaaaagtattttattgagatcgttcaggaaactatgcatttccaagccattatatagtctgggcaagataagttcttatttcatttgtctaatactcatgttcaagggaggccctggttcagtctgggcgcagggctcgcagattacaccttacagcctctcatgttcagataactggcaacaaagcaataaaaagccgtccaacttgtcagtgcgtagcagcaaagccctgaaaattcagaagaacattttcagcaggggaacagcaaacacaaagctgatttatgtgtttctaaaaccaggatattccaacaaggtcagctttacaatctgcacagcgggttcattgtgctaactttacaggccctagtgacatcatacaaagccttcaacaacccctccaccccgcctttactgctttattaccctgaaaagtgagctaaccacccaccttcatgtgggcaggacaaagggctggctctcattagatgattagctcattcaggtcacatctaggtcacttccacctttgtctggattccaaggttagccctcatctaggtgaggggatggggcccctgtgaagtcctcagagctcaccctggagagttaagatgggcacaatgagaaacaggagagcagggtatgttcctcaccagagccagtgttggcacactgggctcaatctcaagaggttccccaaatgagtcagatttatagctgacatcaaggacagcgtcagagactctagtctgtgaaatcatcactctcaattgagggagaccagaacctagggtaccacccagggaatgtcaatccgatagacacaggatgcggtagccagtgtgtgtagttaggcttcggactgttgcagagctatataaagccaaaactcctggggactgaaatttaactgctaaaacctttaacgaaaaaaggtggcatgggccggagagatggctcataaccatgtgtaatgggatctgacgccctcttctggtgtgtctgaagacagcaatagtgtactcacaaacatctaaatcttaaaaaaaaaaaaaaaaaggtggttggagccaggactaaggccatcctgaattgagagcccgtctaaatacccaaaagcatagtctaaaacagtggctctcaacctgtgtcaccaaggaacccttacataggggtcccagacaggacagcctgtgttatcacaatagcaaactttagttatgaagatacaaggaaaataaaaccgatggttaggaacatcacagcccgaggaactgcattaaaggccctcaggaaggctgagacccactgccgtggactagcatacagaacttaaaggcacaagaaataatcaaggcagctcctggatccaccatagatttagagttagggagattagttaagatctaaaaacaaaaagatggctgggtggtagcttgcttggagactggctaatgcaggcaggatattaagaacaaaacaagggccagtcggtggtgctgtatgcatttaattccagagagtagaggcaggcggatctgagatcagggctacatggagaaaccctgtctcgaatccaccccttccaaaaagtcaagccaagagacaagcatgccagtgaaacctaagactaacctttcttcaggtgtaggcagctggcgtgtgtcctcaaatccctaccagaaagcaagacacagaggtaaattactcagaactctaggccactcaaaacccacgccactgccgattttggacccggggacggtcagcgcgctgcggtgatggcgtcagcgagacactcagaatcaccagaaatcatcattactgtcctctccccgaaaccagcccctcctcacaccgcctacctctcgccagcatgcgcttaccattgtgctactgggtacggctggcgtgggccaggaacctggaagagatcattgaatgagcacaggtcgtagagaccccggcctgcagcccccaccccggcctgggtcagttacaaggagtggcgtcacgtggacatcagaaactctagtctgtaaatgtgggtcatcatacccggccccacaccgcagagccctccccacaggaccccaggatacctgcggcacgaggcggacccatgccttgctctccggagtcctcagaccctgcccagaccggtggagaacaaagaagggtgaaaacacggcaaaccgtgtgggcgggtgcacaaagagacccgtgtgccgcccgcctcggccatttatacccacgcctggcccgggggtcctgacggacatagtcgtcttctcatatgcctgacttgatcgcgctgacaaatgcgaagggaacaaagaggaatcatgtttcttactgtcctaagtagagaatcatgtatatgacgacaatttgataaactaccaatccaaaggaaagaaaaaaaaaaaagaaagaaagaaacaggcagcctaatcggccaagattgggtaaagaccctggagctcctacaggataggtcagctctttggtctcctttaggcttatggctttgcggattctgtactcatgtttggatccagtctacccaggaggactcatattgcctacacctagcagaaaaatctgaatttgcacctcagcttctgctctccgttaaaaagaaaaaaaaaagaaaaaaaaaagattactgagtgctctgctgcatgtacacgtgcgtgccagaagagggcatcagattcccttatacatggtcacgagcatttggttgctgggaattgaactcaggacttcaggaaaagcaaccagtgctcttaactggtgagccatctcaccagccccaacatttttatttaaagggggataaaagccacacacacacaaacacacatctggctcatagtctaagatgggttccaaccatgcctacaattacaggcgtgacacactactatgttgagagagagagagagagagagagagagagagggggggggggtcggtttcaagaccgggtttctctgtgtaaccctgactgtcctggaacttgctctgtagactaggctggcctcgaactcacagatatctacttgcctctgccctgagtgctgggattaaaggcatacaacaccactggccagcttttaagaaatatttttagattgattgtatttgtgtctatgtgtgttagaggaagttgtaagccacctggtgataggtgctgggaactgaagccaggtccttagaaagatcagtaagtgctcctgaccactgagccactgctccagcccctttgtctttttttttttttttgagacagcaattctgtaccatgacggtcaacattcctacttccttttcctaaatgctgaaattacatgtgcaaggcactatacgcttctctatcttcattttaaaatacattttagccagaagcagtggtgcacaactttaatcctagcacttgagaggcaggggcaggtagatctctttgagttcaaggccagcctgggctacgcagtgatgagatagtgcctcagaacataactaaaatttaaaatctaagaatcctatagtagccgggcagtggtggcacatgcctttaatcccagtacttgggaggcagaggcaggcagatttctgagttcaaggccagcctggtctacagagttagttccaggacagccagggctacacagagaaaccctgtctcaaaaaacaaaacaaaacaaaaaacaaacaaaaacaaaaacaaataaaagaatcctatagtaattatgtgttcgataagtctctcagttcctaggcccaagttccacctgggagggttataggaagagactcttcagttccaaactgagtgcacgttagccagaaatgacctctaacagtgtaaaatggcttacgaattaactgcttctctaatgagcataattgccttggcctctattaaactattactgaagacttcttttttttttttttaaacgcagatgtagtacaatataatagtaactggttgaaagtagtacatgctaacagacaatatgatacacaaacagggtggcagtagacaggaaagggcagaggccacggcctacaccaagagcctttcaatagactgctgaatggactggatctgctgctttagttgagagccttctttgatggtaacagaacaggcgatgactggcctggagatgccacacgccccgtcctaaagcctgcttggagcgcacaaatacataggggacattcttgtcttctcacagcagagggaggtgcaggatgatccccaagggctcagcgtctgctgccatcacagtgaactcagagatgcctctgttgggggttttggtggcttcattggctcctttccgaagctgcttgtagttacatgactgttgaacaaggcccagcagcttcttggtgaggtgggcatctgcgaggggataggccttcggagtcacatcagtctctgtcatggctgcggtgtgccggcctcgccgcgactcgacgacagcccacctcaagagggactgaaaaactactgaagacatctttaccctagggtggccttaaagtttctgtttggacatgttagaattgcatgcagtttacaccttgcccagcaaatcgattgattctccatggagctggagattgaattgagtgcctcatgcatatactaggcaagcagtctcccctgacctaccctccccagctctcaaaggctggcattgccccactaaaaccctggaagagccaggggtcaaaaggtttctgaggaaagcagctctgtgccctaggttctgcctgcttaaaaagccttggacaaggtaagggctctgctacgtcaccaggcctggaaagagagatggggatggtggggataaagtggatgggtcaggtagcacagtgcccataatcccaccattcaagaggcagagacaggagtcggagagcagcgtggtctagataatcacttccagcccagctaaggctacactgaaagactccgtctctctgactctctgtctctgtctctgtctctcacacacacacacacacatacgcacacaaaccctgcccctccccccaaaagaaaaaagatagccagacatggtgcctggtcacaactttataatttcagctagcaggttcaggggtatggtctggaaagggcaagttcaaagccaggctgagctacagagaaagtgtaaatatagtttgggcaaccctgtaagaggtctcaaaaaagtaataaagaagccaggttgggaaaggcatatgggtcagaggttgaggccagccaggactgcatggggagatgctgtctcagaaaataaagctaaaaaggagggctcagtggctgggggatgaagctcactgtctagagcagtggttctcaaacttcctaatgttgctattcttaagttccacatgttctggtgacacccaaccatgagaaatagttggtgttgatactttataactataattttagcctggtagtagtggcacaggcctttaatcccagcacttgggagccagaggaaggcaaatttcttagtttataggccagcctggtctataaggtcgttccaaagcagccagggctacagagaaatctgtcttgaaaaacaaaaaacaaaacaaaaaccaaaaacaaacaacccctgtaattttcaatgtcttatgcaacccttgtgaaagagtcacttgactccaataggggttcaaacactgtttaggattcaggccctggagggtaagggagagctgagctctcatagccccttgagtccctcttccactgaccccaaacaacagcaccaccctactttttcccatgaatgagcccgaccctcaaagtaaatacctgtactccctgcataactgcactgaaaatccaccaaaaaaaaatcccttttccagttatcacaaaactaagaaatccgggggctggagagacagctcagcagttaagagcactgactactcttccgaaggtcctgagttcaaatcccaggaaccacatggtggctcacacccatctgtaatgagatctgatgcccttttctggtgtgtctgaagatagctacaatgtgttcacatataataataaatcttaaaaaaaacttaagaaatccacagaagcccagaatccattagcccttccaacatacaaacagacaaaatatacttgtaaccttttattttgaatatttaagtcataaaagtttttttcattagtttgtagtgatgcaaagaaaaaaatgtacacagggtggcagtgtagacatgtatgcaggaaggatacaccatctttaacctacttagattaaatgcaaagaacatactggttataccacaaaaccttaacatggacaagcagataaagttttaagtacaaaagagtaaagttatgtagtacacagtgccaagacgtttgtttaagacactttgtcttagagatgaccatctccagggaactgggcagctagactatatgtcttcccaggctactggaacactgatataaaaattacaaaaaaatctttagactttacacatcattagctataaaacataatcccctggtacagtgcacagtgctgctcccaacattactttgaatatatttgaatatatatatatatatatatatatatatatatatatgcatacaaaatttaacagtcaacgcaattaccttaagaaagactgtaactttaaactgaaccatgaagaagactttaaataaccttgacagtaatcggtgcccaagcagctatcaagtgcaaagagtctgttttctagaccacaccgggagagccagcagaggcctctaatccacctcctcgatggtgggtcctgagccagaggctcctttcggcggcgcctgggccccgaagcccccagccccaggagcacccgcaccctggtacagcccactgatgatggggctgcacacccgctccagctcctcccgcttgtgcacgaactcctccttgtcggccagcgtgttggagtccagccaggagatgacctcctggcacttgtccagcaccttcttcttgtcagcctcgctgagcttgcccttgagaccctcgtcctccacggcgctcttcatgttgaaggcataggactcgagcgcgttcttggcggccaccctgtcgcgctgcacctcgtcctcggccttgtagcgctcggcctcctgcaccatgcgctcgatctcctccttgctcaggcggcccttgtcgttggtgatggtgatcttgttggccttgccggtgctcttgtcggtggccgtgacgttcaggatgccgttggcgtcgatgtcgaaggtcacctcgatctgcggcacgcccctgggcgccggcgggatgccgctcagctcgaagcgccccagcaggttgttgtcgcgcgtcatggccctctcgccctcgtacacctggatcagcaccccgggctggttgtccgagtaggtggtgaaggtctgcgtctgcttggtggggatggtggagttgcgcttgatgagcgccgtcatcacgccgcccgcagtctccaggcccagcgacagcggcgccacgtccagcagcagcaggtcctgcacgttctccgacttgtcccccatcaggatggccgcctgcaccgccgccccgtaggccaccgcctcgtccgggttgatgctcttgttcaggtcgcgcccgttgaagaagtcctgcagcagcttctgcaccttggggatgcgcgtcgagccgcccaccagcaccaggtcgtggatctgcgccttgtccatcttggcgtcgcgcagggccttctccacgggctccagcgtgccgcggaacaggtccgagcacagctcttcgaaccgcgcccgcgtgatggatgtgtagaagtcgatgccctcgaacagagagtcgatctccaggctggcctgggtgctggacgacagcgtcctcttggccctctcacacgccgtgcgcagccgccgcaccgcgcgcttgttctggctgatgtccttcttgtgcttcctcttgaactcctccacgaagtggctcaccagccggttgtcgaagtcctcccctcccaggtgcgtgtcgcccgccgtggccttcacctcgaagatgccgtcgtcgatcgtcaggatggacacgtcgaacgtgccgccccccaggtcgaagatgagcacgttgcgctcgcccttgccggtccggtccagcccgtaggcgatggcggccgccgtgggctcgttgatgatccgcagcacgtttagaccggcgatcacgcccgcgtccttggtggcctgccgctgagagtcgttgaagtaggcgggcaccgtgatcaccgcgttggtcaccgggtggcccaggtacgcctcagcgatctccttcatcttcgtcagcaccatggacgagatctcctccgggaagaacgaccggctctcgcccttgtagttcacctgcaccttgggcttgtcgccgtcgttcaccacctggaagggccagtgcttcatgtcggactgcaccaccgcatcgccgaacttgcggccgatcagccgcttcgcgtcgaacacggtgttctgcgggttcagcgccacctggttcttggcggcgtccccgatgaggcgctcggtgtcggtgaaggccacgtagctgggggtcgtgcggttgccctggtcgttggcgatgatctccaccttgccgtgctggaacacgcccacgcacgagtaggtggtgcccaggtcgatgccgatcgccgtgttcttggccatggcgccgcgctctgcttctggaaggctgcgctccgcggcgtggatgctccggggaaagttgcgctccgcggcagggatgctcctgggaaggttgcgctccgcggcgtggatgctctggggaaggctggtcctggccgaggatcgggaacgcgccgctcgctctgcttctcttgtcttcgcttgtctctggatggaaccagatttgattctgagtagctgtcagcgtctggtgccctgctcgccgccctgcgcctttaaggagtcttcaccggccccgcccactctccgctgggccaatcagcgagccggaggaggccttggggccaggaatcttccagcagtttcgcgtctggtggagcttccccgcctcccttgagtaatcggagttgtgggttccgcccttgtccagaactctccagaggtttctggggttcgctagagagtacggattcctgagggggagggtgtggggaagtgctggtgctgctattgacactgttgcggaggcgacgcaacttcggggtccctgtgggtgaagctgttaagggtcagctcctgaaggtgctgggtggtgagagtgtgggactcagaccagggagggagtttaaagtgtacaaatccttcctacaggatggcggacgcagaaagtttctcaagagaggcgggataaggcttggctaaaaagtctgtgattgggtcctggtttgagtgacagcgttgggcaggggcgcctgtggaatgcttgcttgtccatgtctccccctccctcttcattttaggtttgaatagggaaatagaagagatcttgcagtatagttcatttgttttgctgtctttacatcacggttaaggtaggagtaggcggtacatcgcctatggagttctcacaattttataaggaaatcagcgtgaaaatacttgattctcatgttaggaggacctgtgactcaaaagaggaaaaaggaaagtgtcccaggacccggagagcagggcttaatcgaccgtgccaggctgtagccactccctttgcctcaggctgcagcctgacattagtaagaaaaaactttccatagacggtgaggcagaaggactgtagagagtccaagaccagcctccgttatagaggaaccctatctcaaaagattaaataaaaattgctctttgccaagcaccactgtagggtctgtgctctgctgtagtaaggtcaggttaatcaacagttcgttggttcttctgtctgtgtctgccgtctctgtctgttcacctcttttagaagagatggcgtgccctatcctctgatagcatcttgcctcacagtgccctgcgaactttccggtgagatcctaagcctgggtgttggggcccgcctactaattcaccctattagctttttgtcctaaacatcactttctatgcctggtctaccctctcccttttaattataagtacatttagctgtcagtgatgtccccttttctccttctctgcccctcctttctcctcctgtgtaggaattaaagaccccctagtcagatgccttgaaaccacagtatgaggttactgggtatggtggcccacctctgtaatcctcatgctttggaggggcgggcaggaggatgaagagtttgaggctagccttagctacattagagcctctctttcagaaaaaaaaaaaaaaaaaaaaaaaacaacgtagataacacccatagcagagagagactgttaattgtcacatacacacatctttttcatattaaacttttttttcttttattttgaaatagggtcttacatagcccaggctggccttgaacttactgtgtagccaaagctgatcttaaactcttgctcctctagccttgactcctaagtgctggaattccagacaagcactacaaactacacacacaggtctctgagtgtgaattggaggaggcagtttctggagggagccctgcttttaaatacaactccattggcctgcctctctctctctctctctctctccctctctctctctctctctctctctttctctctctctctctctctgtgtgtgtgtgtgtgtgtgtgtgtgtgtgtgtgtgtgtgtgtacataagtccatatcagaatatctcttctgggaatccaagggcatttagttgtctgtgctgtagtttgctgatctcagccagtgtttggaagatgctgcttcatagatcctctgtttgtgtgggaagaattggccagcagcaacttgttccatagttagacctgatgaattcagttctaatgagtcaccaccctgatctagtcaaactggttaaacttcaaaaaattttccattactctgtgcacctctggctggggattcctccaggagtccatgttagttagctacctagtcacttctggagacttgcagactcccttcccttagaggcctctcaccaccacctgtgaccacttgggtttactcttaccctgtcaatcagcaatacatagaactctcttttaaaagaaaatttgagtcagggtctcattctgtagcacaggatatctgggactgtgtgcctggaagctggccttgaactcagctccatcctcttgtctccccacacaagtgctaggattaacggaaacagctgctgtactcagcccatgtccatttctccacaagaaggtatttgaaattttgtctgttctcttagcctgggtacttctgaggcagaagcacagtggtaggttttgttgttgttgttattattttaagatttatttattatatgtaagtacactgtagctgacttcagacactccagaaaagggcatcagatctcgttacggatggttgtgagccaccacatggttgctgggatttgaactcatgaccttcggaagggcagtcagtgctcttaccccctgagccatctcaccagcccccacagtggtagatttaactgctgaagactggagggtctgaaaaatcccccaaactgccagggctgttgctcatttgtagaaaacatgctaagcatccaagaggccctgaatttaattcccagtaccagtcctctcactcccaacacacacacacacacatacacacacacaaaagagaaactttgtttcattcgggaattaggcttttattgagttccatatttggagacaacagagttcagggttctgaggctgggaggactgtggaggacttttaaggggtgggaagcatcaggggcagaagaggaagccaagaacacttgaggagagagagagcctcagccagaagctccagcatctcctcccccatcccgcccccaccttataatgcttctctaaacagccgttttctcctcagtcttcttggttttttaaagatgacataattttaagcatacccaggggaaaccaaaggaaatgcgttgtgacccctggaggccagctttctggttgtgtgtgtgtgtgtgtgtgtgtgtgtgtgtgtgtgtgtgtgtgtgagagagagagagagagagagagagagagagagagagagagagagggagagagagagggagagagagagagagagacttatagttcaagctggctcttggttctgcctcagctcctcaaatgcaggtttaactggtgtaagcaccacaccgtgctgagacaggcattcttaagcaaatttcaaaggtttcggtgacaagagaactctggagatttccagtgatttggaaaaacacccttggttggggaagacctgtatttgtgtctggaatctaccccttggtcaaggatgggttgttttggtttttactttttaacaatgaagtacatgtgtgctcctaaactgcctaagtttctatctgatcatctctaaaatagaattaaggataactacttcaggcaggtgtgatggtgtgctcttgtaattctagaatgggagagggagaggttgaggctcgaggatgctgtgagactttgaacaacctgggccataagaagaaaccatgcctcaaatccactggtgtagctgagctggtgccttgcctgcctagtatgcacaatgcccagggtcaggtccctggcaccacagaaaccaggtctggtatcacacacttgtaataccatcaatggggtagaggcaggggatcagaagtctaaggttttccttggctacccaatgagcttgtagccagcctggaatgcataagatcatgtctcaggaaacaaacacctccccaaactcagacaaaacaaaccaaaaaacaatttcatcgcatggtggcacaagtgattaactgactggcacttcagtacctgttagtgtgtgctcaggcagtttcctctcctctcatggctgtcccacacactcaggtctggctgatgaggtgcttacaagctgggaacattcacagacctatggaattactttgacactaacacaaaaatggtggtaaagtcagggtgctggtttctatctgtaaccccagcccttgagaggaagcaacagagggattgtcacaagtttgaaacagcctggtctctacagccagtttaggccagccagagctatattgtaagaccctgctccaaaaccaaaccaaaccagcagaccttagctctatgttgtaccagtctaccaggagagaggcttcagtattagcttccttataccacaaaacagtgacagaagacaggtgtcgcttttatatgcaaagctggagaggtgtggctgtcttcagacacaccagaagagggcatcagatctcatttcagatggttgtgagccaccatgtggttgttgggatttgaactcaggacctttggaagagcagtcagtgctcttaaccgctgaaccatctcaccggccctggagagttttgtgggtttttttgttgttattttaaagatttatttttaataatgtgtatgtgtacagaagtgcaggtgcctacagaggacaggaaagggcattgagtccactgggactggaatgacagatgtttgtaagttccaaaccatggcgcctgggaaccaaatgcaaatcctctagaagagtaggagaaaaaaatatataaacaatacataaaaatatataaattatatatatatatatatacataaaagtaggagcagctcttcaccatggacccatcatctctccaaccctgagttagaggttatttatttattcattttggtttttccagacagggtttctctgtgtacacctggcccggctgttctgggaaccatagaccaggctgaccttgaactcaggatccatctgcctcagcctcccgagtgtgccaacagtgctgggctgagttggggtttattaagacattttaaagcatagatcttgagtacaagagttaagacagagaggcacctgagagcaggggtgtgggcttttgaaagaagaacggcagacacaaatagatttagtccataacacaaacccggacaagccatggtccctgacctgcacaacaaagagcagacacatacggcttacattgcacgagagcttcatagtactgggtaagccagcaccagcctgtctgggacccacagagcttcccactttttcttagaaccccatgaaagatcggggtgagggagaaggcaagaaggcagtagctgaaaggccagagcacagatcgtccatcctctgccttggagccttttcaaagctttgccttgagtctgcctctcctttcactgacagtatagactcagaagggcagcagagtgaaggtcagggctctgtaagctttaaatccaggtggattaagtgaccacccagcaattcccctcctcctgcccctccctctcaaggccctgcccctaagctcctgtccaaccaagcttccagcttctccttgtctgccagaaactgggaaaggaaggcaggccccaaggcatggctggcacacagatcataggatcttgggatgttaaattcagagcctgactaaacttgctgttcaagagcagagtggaggaaaggggagagagccaggataatagtttgtttgttaagcagtgttcctgagaataatgacagggcaattccttccaggacaaacaattcctccagggcaaagccagcaaaaaatgcaaatatgcagaagtctgacagactcagagaggcaggaaagagtggaccacatccccaactcccaactccccctgtcctccccccctcgtgatttttcaagacagggtttcctctgtgtagccctggctgtcctgagacttgctttgtaaaccaagctccactcgaactcagagatgcacctgcctctgcctcccaagtgctgggattaaaggcgtgtgcaacccccagcccctggcccttgatgtttttttttttttttaattttctttaaaatttttgtgtgtttgagtgctttgcatgtgtgtctttgcacaacctgtgtgcctggtacctgcagaggccagatggtagtgagccagcatttgggtgctgggaattgaacttgagtcctctggggaagcgcccagtgctgagccatctcttcctagacccttcccacgatgtttaaagttgcttctggttttgtttgtttgcttggtagacacggtcttaatctgcaaaccacacgagccttaaactcccagcaatcctcctgccttagccctgcaagagctgggattacaagtttgtgtcacctctgtggtccccctgaagcttcctctcctcctctccttcctcttcctcctcctccctccatcatcgaggaaggcagtatatctattagcccagacttccactctaaaagtgcaagttcaggcgtgtaccacacccagctctgattcaccagatggaaacaatggaaattttcatgactcttacgatactgagataaacaaattggactgcaggaggtgggaaaacagtcctcagaaatgaaaatagccaagcttctgggtagctgcccctcccacctgaccccagctctgcacccagctcacgttctccatcagagaaaatgcaggcgtgcagagatggtagctgtcctgctgtaatgtaactataatgaaataccatgataaaaaaacaggccggtagtggtggcgcacgctggtaggatttgctgaaggaggcagaggcaggaggatcacgagttcggggccagcttgggctacacatttgccaggcgtggtggcgcacgcctttgatcccagctctagggaggcagaggcaggcagatttctgagttcaaggccagcctgttctacaaagtgagttccaggacagccagagctataccgagaaaccctgtctcgaaaaacaaaacacacaaacaaacaaaaaacaacaggtgagaggagagaattcatttggcttacacttccacattgtagtccatcatcgaaggaagtcaggacaggaactcaggggaggaaacctagaggtagaagccaatgcagaggccatggaaggatgctgttactggcttgcttggcctactttcttatagaacccaccaccagcccaagaatagtctcatccacaatgggctggtcccttccctatcaatctaattaagaaaatgctttacagcaaatcccatggaagaactcactcagttgaggttccctcctttcagatcactctagcttgtgtcaaagttgccataaaattatccggctcaagccggacggtggtggtgcacacctttaatcccagcacttgggaggcagaggcaggcggatttttgagttcgaggccagcctggtctacagagtgagttccaggacagccagggctatacagagaaaccctgtctcgaaaaaaccaacaaaacaaaacaaaacaaaaaaaacaaaaaaaccctatccagctcagtaaggattaataaagcaacatacaagaggtcccgaaaaagtgtctactctgttacaccacaccgatgttgagatcagaggagtgttcactggaatacttaaaacatgggcaacaaaaactgtgaagtggcccagcaagatgactcagtaggtacaagtgtttgtacacaaacctgacttcctgagttcaatactccagagcccagtgaaagaaaactgactccccaagttatcctctaacctgtacatgtaccaaacccaccctccccccccactctctctctctctctctctctctctctctctctctctctcacacacacacacacacacacacacacacacacacacacacacacacactgtcttagtctgggtttctattcctgaacaagcatcatgaggactgggactcaagcagggcaggaagcaggagctgatgcagcggccatggagggatgttacttgctggcttgcttcccctgccttgctcaacttgctctcttatagaacccaagactatcagcccagggatggcaccacccaaaatagactcccccacccccacccccttgatctaaatgagaaaatgccttacagctggatctcatggcggcatttcctcaagggggctcctttctctgataactccagcttgtgtcaagttgacacacaaaaccagccagtacgcatatacacacacagttttaaaaaccaaaagtatgatttctgttccagcctcattccagaaataactgttaactgaagcattagcccaaccgttgcattcttccccatctggagctaaggactgaacccagagctagttggtgacgacatagctttcaccacagggcccggttggtgagcatgaagctctcaccacagagctatatctccttaaactttaaaggaattcagaggaggggcagtgaggtggcccagcctgggatgtgaaagaacccatctcaaaaagctcagcaagccccccggaacctgggcttagggtggacatcagtaaaacagtcacctagcatctgcaagctctaagtccgattcctagccaataagtgaagtaaaataaaattgctgggctcagtggtagagctggcctcaagctcaacctcaaaccctcacaagtagatcctaagggccagtggcatgcttcagtaggtaaaggtgcttgctggcaagccttcagatttcagtgtctcccctgggaccaacccagagggtgaggagagaaaacttacttttatagaggtcctctgacctctgagtgtgtgctctggcatgtacaggctccacgaaatggtcctgatcctgcatgtgtgccctgatgtgtgcctgttccacttcaccagtggctctttgtcccgagtgtgtgcccacccacaatggtcctgtcctctgaatgtgtgccctgagaagggcatgcccataaaagattctctgccccctgtgtgtgccttggaatgtgcacaccccacacagtggtcccctgatccctgcatgcatgccctggcatgtgcacaccccacacaatggccccaatcctgcatgtgtgccttgctatgtgcatgctccacaccaccagtggtcctttgtcccctgagtgtgtgccttggtatgtatgtgccccacatagtggtcctctgactgctctgtgtgtgccttggcatgtaaacaccccacacagtggtcctgtgatcactgaatgtgtgtcttggcatgtgtgtgcagcacacctttgattgctctgtgtgccaaggcatgtaaacaccccacacagtggtcccctgatccctgcatgtgtgtcctggcatgtgcatgccccatacataactgcagtaacgatgacaagtagggtggtacccttaatctgtgttgtcagttctcaccttgtaaagaacatcacctgcagcctcctttctgactttatttcactgacgccacctggttttgctacagtagtgtgtacactaagtgagctctctacctttttgtttgtttgtttgttttttgtttttcgagacagggtttctctgtatagccctggctgtcctggaactcactttgtagaacaggctgaccttgaactcagaaatctgcctgcctctgcctcccgagtgctgggatcaaaggcatgcgccaccatgcctggctccctaccgccttttctgaagtcagttttaagtcacttgcatccctgccaccctgccaggggcctgattctctggacccccatgctcaagctctcccccacttccacgagaatttactccagaccctcttcactaagctggacctcagccccgggcagggtttttatttgctctgactttaatttttctcacacaagcagatcacaatgcaatgtccctgtgagtgctccacacccgtgtctgtgtcttcagataaaatgttagtcaagcgtagccgaaactgtcatacacagcaactcctgacctccaaacacaacaggcacaagacctggcaagtgattttgaagtttattttcaaatgaccggtaaaaattgacccgagttcaggatggttgtgtaaaaactgaacacatgctggtgctgtcacttcacctccaagttcaccaacctggaaacaagtcctacagtgcaaccaccatgcaagattataaacgcaaggagaagcagcagagtctccgctgtcagtaatccagccctggcctctgaaggacccgacacaagcatgtatcaacaatgtggcccaggggagagtccaaacacaaagaactcaacagtctcctgatgttttcataacatatctctgtctctttgtgtattctgatacagaatatctctctacatagctttggctgtcctgcaaaacaaatcacatcagcggggcagtgctgaattgaagaatatatatacttatttatttatatttacaaagacacacttgcagtgttaattaacagggaagataaagcccacgtgcaatacacaaagtaactgaaagacagtttagtttccctaagtctaggacttgattgcaggacaaactaaggagtgaagtactaaacttgaaataatgacagtcctcaaggccacatatctgtctcctagccagcaccgggagagccagcagaggcctctaatccacctcctcgatggtgggtcctgagccagaggctcccttgggcgcctgggccccgaagcccccagccccaggagcacccgcaccctggtacagcccactgatgatggggctgcacacccgctccagctcctcccgcttgtgcacgaactcctccttgtcggccagcgtgttggagtccagccaggagatgacctcctggcacttgtccagcaccttcttcttgtcagcctcgctgagcttgcccttgagaccctcgtcctccacggcgctcttcatgttgaaggcataggattcgagcgcgttcttggcggccaccctgtcgcgctgcacctcgtcctcggccttgtagcgctcggcctcctgcaccatgcgctcgatctcctccttgctcaggcggcccttgtcgttggtgatggtgatcttgttggccttgccggtgctcttgtcggtggccgtgacgttcaggatgccgttggcgtcgatgtcgaaggtcacctcgatctgtggcacgcccctgggcgccggcgggatgccgctcagttcgaagcgccccagcaggttgttgtcgcgcgtcatggccctctcgccctcgtacacctggatcagcaccccgggctggttgtccgagtaggtggtgaaggtctgcgtctgcttggtggggatggtggagttgcgcttgatgagcgccgtcatcacgccgcccgcagtctccaggcccagcgacagcggcgccacgtccagcagcagcaggtcctgcacgttctccgacttgtcccccatcaggatggccgcctgcaccgccgccccgtaggccaccgcctcgtccgggttgatgctcttgttcaggtcgcgcccgttgaagaagtcctgcagcagcttctgcaccttggggatgcgcgtcgagccgcccaccagcaccaggtcgtggatctgcgccttgtccatcttggcgtcgcgcagggccttctccacgggctccagcgtgccgcggaacaggtctgagcacagctcttcgaaccgcgcccgcgtgatggatgtgtagaagtcgatgccctcgaacagagagtcgatctccaggctggcctgggtgctggacgacagcgtcctcttggccctctcacacgcagtgcgcagccgccgcaccgcgcgcttgttctggctgatgtccttcttgtgcttcctcttgaactcctccacgaagtggctcaccagccggttgtcgaagtcctcccctcccaggtgcgtgtcgcccgccgtggccttcacctcgaagatgccgtcgtcgatcgtcaggatggacacgtcgaacgtgccgccccccaggtcgaagatgagcacgttgcgctcgcccttgccggtccggtccagcccgtaggcgatggcggccgccgtgggctcgttgatgatccgcagcacgtttagaccggcgatcacgcccgcgtccttggtggcctgccgctgagagtcgttgaagtaggcgggcaccgtgatcaccgcgttggtcaccgggtggcccaggtacgcctcagcgatctccttcatcttcgtcagcaccatggacgagatctcctccgggaagaacgaccggctctcgcccttgtagttcacctgcaccttgggcttgtcgccgtcgttcaccacctggaagggccagtgcttcatgtcggactgcaccaccgcatcgccgaacttgcggccgatcagccgcttcgcgtcgaacacggtgttctgcgggttcagcgccacctggttcttggcggcgtctccgatgaggcgctcggtgtcggtgaaggccacgtagctgggggtcgtgcggttgccctggtcgttggcgatgatctccaccttgccgtgctggaacacgcccacgcacgagtaggtggtgcccaggtcgatgccgatcgccgtgttcttggccatggcgccgcgctctgcttctggaaggctgcgctccgcggcgtggatgctccggggaaagttgcgctccgcggcagggatgctcctgggaaggttgcgctccgcggcagggatgctctggggaaggctggtcctggccgaggatcgggaacgcgccgctcgctctgcttctcttgtcttcgcttgtctctggatggaaccagatttggttctgagtagctgtcagcgtctggtgacctgctcgccgccctgcgcctttaaggagtcttcaccggccccgcccactctccgctgggccaatcagcgagccggaggaggccttggggccaggaatcttccagcagtttcgcgtctggtggagcttccccgcctcccttgagtaatcggagttgtgggttccgcccttgtccagaactctccagaggtttctggggttcactggagagtacggattcctgagggggagggtgtggggaagtgctggtgctactagtgacactgttgctatggcgacgcattactaaggcctgtgtggaatggacaagaaagatcacctctagctcggtgttgtgtacagtttgttgtgatttgtggggtttcgccaactcgcacagttctgaatatgggggttaaaggctaaaacttaagggctaaaacttctccccgccaagtttaggagacccagggagatgcctgggggcgtgtccggtgacgtgatcctctccaatcgcgttacaatggcagtgctgcctctgacctcatggactaatttaggaactagaggctctgtcccagcacaggctcaaagttgccgggaggggcggggtggggggtgggggggaccccggctgctcagtttggatgttcctggagctccctgctcgtaggggctcagcgacttcaaattttccaaactggatcgaaggcgtagagatcccaggtgagctgggaaggctctgattggagtggggcagaagcctctgtgtcccagttggtcctcgtttgatgggttgagaattttcttaggtttgactgatttacagtcatggtctattggaagccaccatccttaggcctcatcgtctttaagtgttgggattactatgtggctcttcacacacagatccccagttgtattaattttggggttggtggttggcaatcaagaagaaatggggctggacgcttgagggacacaagtggctggaattagtctgagctcaaatcggaggcagacatcttaagacctttttgaatatggtattgaccctgaagacaggagttacaatcaagagagggaccgaagcctaggattccagcactccggattttcagacaggatggctgcggagatggggctggtgtgggaacagggtcgaagatgagactttgagccctacttctatgaaaagctagaaaagttgctgggagccgcctggaggctcaagcctttaatcccaactgttaggaatggaggcagagtattgcctgagctacatagttggaccctgactcttcttttctttttttttttttttaagcttggagggtgcggggatcctaacagccatccttagagtgagctaaattactccaccataggttgctaaggaaggcaacctgatctgaggaaagcctagtgcatgtctttaatggtttgtctgtctctgtgtgtgtgtgtgtgtctgtgtatctgtctgtctgtctgtctgtgtgtgagaagaggctgtctcaccccctgaatgagacagttatgagctgcccgctatgtgtgtgtctgtgtgtgagaagaggctgttttatccctggatgagacaattatgagctgcctgctgtctctctctctctctctctctctctctctctctctctctctgagagagagagagagagagagagaagaggctgtgtcaccccctggggtaggccagttatgagctgcccgctgagggtttgggaactgggctcaggttctctagaagagcaggaggcccctgtcactgccacctcttaggtgcccccaatatgtcttaaggagttcagaacacagtcttaggaggcaggtagacaagtgtggtcccacagtaaaatatatcactgacataggaagagtagagttgatttcggtcctgtaggaaatggaggatacagacccacccttggggtagctgagaacactgttgtctaccatctatgtaagtcctttcccatgaaagccaggtctggatgtgggtgtgtgaacctatgctaacagcagcatcattcacaatagccaagaagtggaagcaacctggtgtctatggagagatgaacatgtaaggaaagcaagggagatgtgtacatgaacagtgtttagttttggaattaccaaaatagacaagctcacgcgtaagaattaaggaccattatcttgagtgaaataaggccagccacaaatagacaaacacagtataattccaattgtatgagttactaagcgtagacaaatccagagacaagaatccagcaaacaggcaactcatggtgaagaagcccagccatggttagcacaggctgtactcccagctacttggcagactgtgatgagagactgccagggcccatggcctagaaaatatgatgagacccattttgaaaagaattcctattacaatgagtctctttcaaaatgaatagaggtgcctggcagtgatggtacacaccattaattccagcacttgggaggcagaggcaggtgaatttctgagttcgaggccagcctggtctacagagtgagttccaggacagccagggctacacagagaaaccttgtcttgaaactctcccccacccccaaagaaaaaatgaaaaccaccaaaggaaaaataaaacaaaatgaatagaggcaaagttcattattgacttaaagattttaatcaagtctattgggatgaggttcagactaaataggaagtgagtttggcagtggaaagaggcctatggatgccccctatgccatgttgatgtttgaccagcctgtctgttttttggtttttcaaaacagggtttctctgtgtggccctggctgtcctggaactcactctgtaaaccaggctggcctgtcttaatgtatgacatctggtagacaagaaacactgtagaagccagagatgatcccaaaacagatacttgggagactcaggggctgctggagggtctgtgctctgagtcaagagtccagtgaaagcacaaccatgctgtggtaatgtgagctcagtggtacagccctggcttagaatccccaaagtcctagcttctgccccagcacacaaagacacagattccagagccaatcccaaagaataaagacagtgagaggtgaacagagagggatttggacaaggtttgatattcttcagagactccaactcaaaacgtatacagttgttagccctggacaactcaaaacgtatacactgttgttagccctggacaactcaaaacctatacactgttgttagccctggacacctctggggttgagactttgtagcacttttccctcgttggtttcatgtttctcacaaaagaagagaaagtgtggaattgtagggtgtatcagacagctcagacagttgttaagaaaaacagcctggctatatagagaaaccctgtcttgaaaaaaacaaaaacaaacaaacaaaaaacaaaaacaaaaagaaaaaaaaaggaaaagaaaaagaaaaagaaaaaggaaaaacagcctggtttggtgactcacgcctgtgaccttgccagaccttgggaaggctaagaaaggagaatagcagcacttttgaagctagcctggtatacatggtgagttacaggccgagttgcaggccaacctccaggcatacagagagacactgtctaaaaaaaaaaaagcaacccaaaacaacctttgagaagccatggagattgctcagtgggtacagtgtttgttgtgcaagcatgcagatctgagttcagaacaacaatctgatcatgcttgcattcagctgtgatcacaggccaagctggatggatcactgggttcactggcaagccagtataacctacttgaccagggtttcaggccagtgagtggccctatttcaacaaggtgattggcaggagaatgagacccagggttgacccctgaaggccacatgttcatgcacacacacacacacacacacacacacacacacacacacacactctgacacacacgaaaacagccacagagacattttcaagctctctgtgtaggacttccttctgtccagaagaaggtagagagtctgggctgtgtttatctttacatttgtggctttaagactgatggatggaactggagagctgactcagcaattaaaagcactttctggcacctatatggtgacttatgactgtaaccccagtctcaggggggtctgacaacctcccctgacctcctagggcacatatatatatgaagacaaaatgttcagacacaaaatactttttaaagtttttttttttttttttaataagaaggctagagaggggctggtgagatggctcagtgggtaagagcacccgactgctcttccgaaggtccagagttcaaatcccagcaaccacatggtggctcacaaccatccgtaagaagatctgactccctcttctggtgtgtctgaagacagctacagtgtacttacatataataaataaataaatcttaaaaaaaaaaaaaaaaaagaaggctagagagggttcagccattaagaacaaagataggaagcccggattttgttcctggccccgacccatgttgtgcggttcccaagtgtaactccagctccaagggcatcccataactctgacctccacaggtacctgcactcgtgtgcatatacccattcagacatacatgcatacacacatgaaatattaaaaatgcatcttgaagagaaaaactgatcaataaatagcttaagttttatttaaaaagaaaacactagcctaaatatgattttcaagtctcctttctccataggcctcggaaaaccatggctgctaataaaggaatggcgatcggcatcgacttgggcaccacctactcgtgcgtgggcgtgttccagcacggcaaggtggagatcatcgccaacgaccagggcaaccgcacgacccctagctacgtggccttcaccgacaccgagcgcctcatcggagacgctgccaagaaccaggtggccatgaatccccagaacactgtttttgatgccaaacgtctaattggcaggaagtttaatgatcctgttgtgcagtcagatatgaagctttggccatttcaagtgatcaatgaagccggcaaacccaaggtgatggtgtcctataaaggagagaagaaagccttctacccagaggagatctcatccatggtactgacgaagatgaaggagactgcagaggcttttttgggccacaatgtcaccaacgctgtgatcacggtgccagcctatttcaatgactctcagcggcaagccaccaaggatgcaggtgtcatcgcaggactcaatgtgctgagaataatcaatgagcccacggcggccgccatcgcctacggcttggataaaggaagtcacggagagcggcacgtgctcatcttcgacctggggggtggcacgttcgacgtgtccatcctgacgatcgacgacggcatcttcgaggtgaaggccacggcgggcgacacgcacctgggaggggaggacttcgacaaccggctggtgagccacttcgtggaggagttcaagaggaagcacaagaaggacatcagccagaacaagcgcgcggtgcggcggctgcgcactgcgtgtgagagggccaagaggacgctgtcgtccagcacccaggcaaacctggagatcgactctttatatgagggcatcgacttctacacgtccatcactagagcacggtttgaagagctgtgtgcagacctatttagaggcacacttgagcccgtggaaaagtctcttcgggatgccaagatggataaggctaaaatccatgacattgttctagtagggggctccacccgcatcccaaaggtgcaaaaactgcttcaggactactttaatggacgggatctcaacaagagtatcaatcccgatgaggcagtcgcctacggagctgcagtccaggcagctattttaatgggcgacaaatctgaaaaagtacaggatttgcttttgttggacgtagctcccctgtctctaggattggagacagctgggggtgtgatgactgtactgatcaagcgcaactccaccatccccaccaagcagacgcagatcttcaccacctactcggacaaccagcccggggtgctgatccaggtgtacgagggcgagagagccatgacgcgcgacaacaacctgctggggcgctttgacttgactggaatacctcctgcacctaggggcgtgccacagatcgaggtgaccttcgacatcgacgccaacggtatcctgaacgtcacggccatggacaagagcaccggcaaggccaacaagatcaccatcaccaacgacaagggtcgcctgagcaaggaggagattgagcgcatggtgcaggaggccgagcgctacaaagcggaggatgagggccagagggagaaaatcgctgccaaaaatgccttagaatcgtacgcctttaatatgaagagcgctgtgggtgatgagggtctgaaggacaagatcagcgagtccgataaaaagaaaatactggataaatgcaatgaggtcctttcctggctggaggccaaccagctggctgagaaagatgagtttgatcataaaagaaaagaactggaaaatatgtgtaatccgatcatcacaaaactgtaccagagcggatgcaccgggcccacctgtacgccagggtatactcccggcagggctgccacaggccctaccatcgaggaagtagattagccttttccagaattgcagggtgctagggtgcctctaggcgaattttattcatcttcaaacatcaatatgattcttgaactgactggactcaagcctacgtcaccatcctttgggatcccgatggagaagcctcgaactcgaccttttcacacccccaccctctcatctatgatcctgaactggacctttaggaaaaccaggcccctctttgagccatttgaagaatttggatgtctgttatttattatccacaccccacctttctccttcctgtgtggatggttatttgtctctcagtaaatttgttcccaaaggaaacaacttctgtcatcttttattttttttagtcagggccttactgtatatgtctagctgacttgacacttactatgtaggccaacttggtccctaacttgcagcaattcccctgttctgcacctgagtcccgagatcacaggtatgcaccatcatgaccagcttttgatttttcagatggatgcagagtttctttttcttttttttttgggggggggggttcgagacaggagttctctgtgtagccctggctgtcctggaactcagagatccccctgcctctggctcccaagtgctgggattaaaggcgtgtgccaccactgccccacacggcagagtttcttggagcccaggctagcctaaaacattctatacaccattttatttcctggtatctgtaagctgtcaatggtccttgaaaattaagaaaggaagatatgcatttttccattcgtgggtcccttgtgaatgtttaacttgataagggcaaagtacttgaatttgtgtaagttcatttccaacaaaaccattttgctttttgttttgttttgtggttttgagacagggtctaatatagcctaggtctgccttgaactctgatcacgatacctccacctgccaagacaaacatttcctaattctcaggcaccctgggcccaaaggacgcagttgctaaatgtactgactgcttctatccagtgacagcttgttttcgattcaaatcttaaggattctgctgaacttgggaacaaatcctgcttggtaccatgctggatccagctctgaacacagtgatgtgcaccggtaatgccagcactgggggagtgggtaggtagggcagacagaagaagcatcttagggtcttgctggcaagtcagtctagctgaatgaacctgtcagctccaggatctatggtagatcctatctcagaaaatgagagaaatgactaagtggttaagaacacgtgttgctcttccacaggaccagggtttgattcccagcacctatgtggtggctaacaactgtaactctagaggatccaacactctcttctagtgtctgggagcactgcccatgtgtacacagatggacatgcaaggaaaaacgctcacacatatacaattttaaaatattaaataaggtggaaagaacaggcagtatctatctctggcctacacagtcatgcatgctccagccctcactcccacccccaggaaaccctggctacaatctatttagattattacactagagaattccaccctgcaatcagcaggtttagactctcagaattttcacctgtgtcccgtgactgccttgcacctacagccagcctcaagaagagaagacagaatagaaagtgtttccctatttatccagacatgatatccacagaagatacaacctagcaacttcccacttaatgtaattatttaaaaaaaaaaaaacaatagggctggagagatggctcagcagttaagagcactgactgctcttccagaggtcctaagttcaatttccagcaagcacagagtggctcacaatcatctgtagtgggatctgatgccctcttctggatgtctgaagaaagccacagcatacttacataaaacaagtcaatcgaaataacaacaaagccctttcatctcagaccatctctttcttctctggaacttgcctactgaggcttttctagttttttgttttttttttaaatcagtcagctcttgtgaactccttcacaaccagcatgttacaagcctggtaatgctgttcccagaacatccaaagtagtatctgtcggtgatctagttgaaaatatttcagtaatgcagggatggatcagcagttacaagcatctgttgctcttccagaacacccagatttgattgccagcacccacaaggaggctcaccattgtaactccaggcccagggcatttgaagccctctcttctaccaggaactcatgtagtacagacataacatacaggcaaaaactgtcaaacacacacaaaaaaagctaagataaagtaaaatatttctgtcactgagttccagtcagtttagtcctttacagacgagtcctatgccaaattatatatatatatataacattagagctgggatgttgttcatttgctttgcttagaatgtgtccgctctgggtcaactttgcaccccaaaagactgaaattgagagaaacttacttactgggaacctttgataagaatcaggatttgtgttccggtttctctctcacactcacacacaccataaccagtgtgtattggtgtatattttattctctgacacagggtcttgctataatagctttagttgacctctaaaccagaatcctcccgtctcaactccaggattccagttgggcacgaacgctgtccagctcttagcaacattttaaattttactaaagaatacgcaagtcataattttctcaatcttcccaataattccccatagaaaacgtagactacgagctaatcacgcggcagagagaaaagtctcaacaaccatcagaaaaagagacgaactacgtccaacgcgcagctgccacggcccacgcatgcgcttgtgagaaagcggctgctcgggaggaagtgggggggacaggaagttccgcccctctaccggtttggcggtcctctcggctctgccctaccccgctccctttgagcctgaattcagccgaggttttcgcggctccccgtgcgcctgcgtgatccagtcttgcttcacgcgcgggctcgcgctccggctcccgccctgcctccggctcgcagtccccggcgccttccttcgcggtccaggccgccccgcgtggcgccagcaccatggtgggtaccgtgacgtcaaaagggagcgccgccgctcgcggcgggcggttcgaaccgtgcgggcgtgggtgcgggcactcgtgtcggtcgcttggggcggcagccaggccccagggttttccgtacagccttactgcccacaccccagtgtgaggaggctgctcggagccgatggtgttttgggggaaacctttagcaagtccaagagaaagcccacgggcgccgggggagaacgggaagcgagccttgcacttctgtgctgttgacgaggactttgtgagggtgcggttgggaagcggtctcagctgggaggtggtcgactcagagagtgggttctagcgtcgaggggtgcaacgcaggtcctgtcactccgtggctccgtgaactgcagagtcccgtttaacggattgttgttggttatgaagttttgagaactactaggaggggctacaaagactagtatttcaaaatactgtcacgggctcctcctccccgtcccttttcatgtgatagttcctccctcttttccaatagctcttctactcctttttcaagtctcttgtgggcaaggatgtagtcgtggaactcaagaatgacctgaggtaggtccttattttagcgagttggtggaaggtgggggtgccgggtgtcctgatcctttttgtcgttgttgttgacaaagttacttcagagtaggtaggcaaaacacagaagaaatacctttcgtcttaagtgtaaaagattagtttaagagtgagcctggtattgtgacacatgcttgtaatcccaacactgaacgcagaggtgtgagttcaaggacagcttggtctacatatgtccagggccatccggagttacacagtgagatacagttaagtaacatgtatgtgtagtcctggctgtcctggaacacacagatccacatgcctctgtctcctgagtgctaggatttgcctggctgtatcatttgctcttaacgattcaggagttggggtaaatgcttaaatgctgtaccactggaaatatgtttatgggttcttgtcacatccgttaaggtctacttggttcctaatagtgcttcgaaaattatagtttcattgaagccgggttttgtttgcttttgttttctttcatgtactgggcatgctcaacaagtgaacttcatatgcagccctcatgtttctctttaaaataacttttttttttttttccagacagggtttttctgtatagccctggctgtcttggaactcactctgtagaccaggctggcctcgaactcagaaatccgcctgcctctgtctcccgagtgctgggattaaaggcgtgtgccaccaccgcccagcaaaataactttatttgtagactcttgaaacctttgaacacacatcagtggttgaccagcaggatggttctgaccagtgtggccaagttagaagctggcccagactgaggtgcagactaagacctttcatagtctaaaagtcaaatcacacgaatggtctacagagctgtggggattcataggatgtagagagtgaggaagtaaaactcaggatctgaggtggttaaagttggttacacagagggtaaatataatataaggtggggcatgtaaggtggtatgggagcactggccttgataaccttgcttaggggctagagggctggagaactgagaagacttgacttgtatcttcattattaaagataagttgggggggataacatttgaaatgtaaataaagaaaatatccaattttttaaaaaagaagaagaagccgggtgtggtggcgcaggccattaatcccagcactcgggctacacagagaaaccctgtctcgaaaaaaaacaaaaacaaaaaaaaaccaaacaaacaaacaaaaaactcatacgagaaaaaaaagagtgtagcaaaaataataaagagtaattccagctaccagtatgtgtacataggtctgtgactccaaagcagtaaatgtttacaaataacagttagggaagctgcagagattgctcagtgctttaaaaagagcttgctgggggctggagaaatggctcagagattttaagagcactgactgctcttccgaaggtcctgagttcaaatcccagcaaccacatggtagctcacaaccatctgtaaagagagcggacatcagacgccctcttctgtagtgtctgaagacagctacagtgtacttagatataataataaataaatctttaaaacaaaacaaaacttgttgctctccctgaaaaataagagttcagtttccagcaactacattaggtgattcacacctacctagaactctggctgcaagtgatctgatgccctcttctggtctctgtgggtaactacatgcacatacacacaaataataaaaatcaatattttaaaaataatagttgatgcttctgggagtcatgcagatctgggctgaccttcagtttattggttgtaagttttgttaccttccatgacctctctcatatcctggaggatgataatactttgaaagatgattagctaagtggtgttgatagcagtgcatcccttaaacctttaatccagcactcaggaggtagaggcagaaacaggtgtgagtttgaggccagccttatctacatagctagttctaggtcctcacagagaaacccagtggggaatgatcatgaatagtgggtcccagctgtagttccacaagtggaggtaggaggattgccatagtttgaggccagcctgggcgcagtgagatcctgtctttaaagggaaatacaagtagtaaatggaatgcaagcctggcctgcagtagttaaatattagcttctgatgcattggtgtgagcaaagactgagtctgggatgcattttcgtttctacctcagaactcacagatgctgcctgcaggcctcaggtccttaagttcctccccgacttgtcgttctagttttgatttttccctccacgctgatttcagcataaaccaatgcttcttccctctttgcccttgacagcatctgtggaaccctccactctgtggaccaggtgagatatacaataagggtcagtttgttcttggggaaggaaagcagccagtgagggtgggttgttgtatcttgtctctagggttaatgacgatgttcctctttcttagtacctcaatatcaaactaaccgacatcagtgtcacagaccctgagaaataccctcacatggtaagttggggctggggagggggaggaggaggaaacctttaaagcaaaaggcccctgggtggccggaggacacacttttaatggaggtgctttcatatttgtctccagttatcagtcaagaactgcttcatcaggggctcagtcgtccgctatgtgcagctgccagcagatgaggtggacacacaactgctacaggatgcagcaaggaaggaagcccttcagcagaagcagtgatggcacctcccccctccccctcacttccccattggtgacccagaacttgacgtcctactgaggacaagaacacccctgcccaatacttaaggtgtgttttgttttgttaatgattttttttttttctttttaactgaatggatgagagataattcctctgctgagaagggagggtaagagagccaggaactgcagaatggtcctggactggctcccagtctgtacctttttctcatctttcctggagatgggagcagcatcctaagcccttccgtggcgacatgtaatacatttgagggatggaaagatctgtcccgcatcgggaataaaacttatgatgcaagctgaattcctggtttgtcgtctgctttgggcagggagttgagaaaggatgttgaattcactgacactccagcaccctacattcctcctcctcccatctccaaccaagattccaacctgatttaccagcatgatgtacttctgccctaaagcttgtagtcgggtaaattaaggtgccagtgccaactcttaaacatccagcctttcctccagcccaccacccaccaaaggtaatggaagagaaagctcttaggatgtgggggaagtagattggtttagcaataggtgagctcaatctttatcagcagttcagtcctgtagcaaataccaaatatgaaactgcagctgcagatggttctttcggacaggcagaccccacacataaaccagcagctgtagtccagtcctcttagctagcatgaactagcagttgtagttcaatcctgaagaagccacccggcttgccagaagacgttgagccactgaagcagcaaaaagctacaggaacctcacgagcagttcttgggtgagtttctctcaatggcagcattactgcaagtggagctcaacaacgctatgcaaggtgaaccaggtcacaggtgtcattagcaaagaatagcaaggcagagcaaaccaaaccagttctcatgctccccgtttgtagggtaatatttacactcgtttatcatgcgctcttttatgtgtctgctatagcaagacattctttcacctgtgtgccccaggaaaacatcatttgacataatcgactttccaaagaaactagaagtttctacttcagccactttagaagcaaactcccaattagaggttcttcagtgtccaccatcttcttaaacttttttttttttaagattattatatgtgagtacactagctgtcttcttgctggaatttgaactcaggaccttcagaagagcagtcagtgctcttaaccgctgagccatctctctagccccaaccaccatcttcttagaggtagtattggggtgctggcaggagctctggcatgaaaagccttatgttattaaaacatcttaagagcggggcgtggtggcacacgcctttaatcccagcactcaggaggcagaggcaggcagatttctgagttcgaggccagcctggtctacaaagtgagttccaggacagccagggctatacagaaaaaccctgtctcgaaacgccccccccccccaaaatcttaaataccataatctagatctcaagactatatatagcatatctgaataggcaaacattgcttgtttctagctatttactatctacttaactttgaaaacatctacagaaggctaaataactcttatttctgtaattagctaaactaatatctgccatgaccacaatttgattaattactaacttgcatttcttaattatcctaaacagtttgtaatatagtatcatttaaggattttagaactttagatttttaaatgagttgctgtggtgcaatactctaaactagttgaaacatatacaatatgataaaacaaaaatataatcttgaatgcatatcagtatacaaaaatatactcatgggaaaatatttggcttattgatgttcattaatataaaagtagatttgggttggagagatggctcagtggttaagagcactgagtactcttccagaggttctgagttcaaatcccagcaaccacatggtggctcacaaccatctgtaatgagatctaatgacctcttctggtgtgtttgaagacagctacagtgtacttacatattataataaatcttaaaaaaaaaaaaaagagaagtagattcaataatctacccttttatcctatcatctctatattcccctttttcttttcaccacctctcctctcccttcccactaatactagataggagagaaaggaggaaagaaagagatccctgaatctaattttactgggtttcctggttgactaagaccattaacagcgtgtgacccatcccccttaaacaatgacaaatatccatcacccagcaaatgagcaaaacccacccatcccacctcttaggaatggcggcattgttctcttaaaatacttcctgagggcaacagcattttttgaggaccttaagaaaattgagatattggtcaagtcctgggagagctagctagttgtatcatttgtggtccagtccttgtgatgggaaagagcaaggcttaattgaagtcctggctggaacagcctgtgggactggagcatcttagcaaggcatgttgaagttgtcctggatacagatttttgaggaaataattcctgaggctgtgaagctggatcaccagggctacttgtctggtctttttgatctgaaaacacacaaagtgtgtataactacagaatcagcctttttagacttaaagcaatcacctattgaaatcccgaatatgtgtctatggtctggaacatatactctaattttttaaactctggaaaaatgaaacatactcatttgccaaatttctttggggggggggttccctttggaatttggagtttggttttccaagaacaaatgggacattgtatcattttcttggcttgttgccaagtgatagaagcctctttctttaaacctttgctgttagcatggagattatttttgttttttgagacagtgtttctctgtatagccttggctgtcctggaactcacgttgtagaccaggctggccttgaactcagaaatccacctgcctctgcctcccaagtgctcggattaaaggcatgcgccaccacctctcggccacaatggacgatttctatttctgcttatttgttgtagttgaataaatagtgacgttttaattctcaatcatttggaataagttgagcagtttcaatatgtaaaacaattctttctgcatagagaaactatattaagagatgcaggaatatcgaatattatacaggaatggcatacatctctgatttttaaattgaatcataagggctctgagccactttatttttcctgatttataacttgcccttcctgacttatttacataagtgtagaatgtgggggctccagaaatcggtttccctttaactatatgagggagaatctgattagtacttttcaaaaactgaagttgctttggggatatttattgttaatttctctagaaaattaccagaaactctttgccaatgttcattttctgcccataatgaggcaatttcagcattagtaaaaggtaccacaatttctgctgggtctattcctgctaattgacaaaatatcaattttcctttcaaaatcaatccagaaaccttttccacataggccttttttttcagttttttatcctaagaatatccatcctaagatagtatctctctctgcctgagggtgcctgtgggacaatgagtaataggaaaataggaaccaacagtccatatgtgcatccggtaattgctttgctttcctggaactcactctgtagacgaggctggcctcaaactcagaaatccgcctgcctctgcctggcctgtaacttcttttctatcagagccaataccttttcagctttagctgatttttaaattttatttattatatgtaagtacacaatagctgtcttcagacactccagaagagggagtcagatctcattatggatggctgtgagctactatgtggttgctgggatttgaactcaggacctttgggagagtagtcagtgctcttaaccactgagccatctctccagcccacctgataactttcatgaactgtttaagtcttaatcaccttgtaagctttgaaataaattacttagctcttgagtagttaattcaactgtggaatttagccaattaatatctcccaacaatttttgaaattccttaagtttataattgtctcctgatttgtacttactgtggttgaattttctataagctatcttatatcttaggtgattaatacaatctcctttggattttttccagaagcaaattgttatcaccaacaaggcaaaattctctttactgcatcaattttttaaaaaggatttattggactggtgagatggctcagtgggtaagagcacccgactgctcttccgaaggtcaggagttcaaatcccagcaaccacatggtggctcacaaccatccataacgagatctgactccctcttctggagtgtctgaggacagctacagtgtacttacatataataaataaataaatctttttttttttaaaaagggatttatttattggtatgttgagtacccagttgcttccttcagacacaccagaagaggcattggatcccattacagaaggttgtaagccaccatgtggctgctgggaattgaactcaggacctctagaacagtcagtgctcttaacctctgagccatctctccagcccctattttgtcaagtttttaaaggtatctccatccaaattagccagccacatatcatccagatgataaattttagattgaactgttatgaattatttcccacagctcttgtacaaaatattggcatgaggtatgactgtttaacattctttgtggtaagactttgcaattatatctctttattggacaactattataagtagcaaacctttttctatcctgctcatgcaaagggaagtctccacccagttggtgaagtctggatgccagcagctgtcacggctccagcagatccaaggggggtgttaagtcctgttcctacttcataaagggatgaatatctcatctctgactgtagcagagtttgtagcaccagttttgtcttctcttcctcctagagttaaactgggggaatagtcacaaccaggctacaaaaccctggcctggggggggggggcagggggggagcgggcagtgtctatgcagggagttttctttcctttacatcaaaggaagaaggggggcaatgtacaagtcaaggcagtaacagtctgacattggcagtctgttgggcccaggagaaacgcagaggtaggatagatatttgaccaaaaaggggaatgaatgtccagaaggtccggacaggtgtcatttcttttggctggtgttatcacagaagtatttgtgggctctgaagcaaggagggcggtaagtgctggaggtggaaaagaaacagtgggcaacatttaggtatgtggtgaatgggaaggagctggatgtgttgggtccaggatgctgttgatcacatttgttccactgtttcattttcctgtagaacaatgttatgatgagttaacacaggcttaactgtggtgggtacaaggagatatgcaagacagcagcaggatacctagcaaggaactgatagaacttgtccaacacccctgtacaccagcaatcatgctaggcgtcttcataatggattatggaatactccgcatcactgtcccgaaggtagatggatttcccctttttgcgattagtgggacctttagtaaagccctcttctagcctgcaggtgtacaatcagcacactctaagtatcagcatccttgagatgtgatggctctgtttgtcggaaaggaaaacacagtcattcaggacattgctgctataccacaatctgtggactcctggcattcctgctagtgagtagtctactgtcctgacagattcctcctctgacataaaaccaccagaccataccaggaagagaacagggctagccatagcactcgtgttaagcagggtaaaaagagccatcagaatgaaagagaaggatcctctgtgtggacatgtgtcattggccctgagggctgcaagggaaaccagaatggtggacagttttccaagtcttgtaaaaattttggaatagatgtctcctgaaagccggtctattatcagttttgatatggagagggacccccatagtagaaaaagtgaagaacacgagactggttagttttttaaaatgggaataggtatcaatggtaacaaatacaaatttttgcataccaaatgatgagatgtgggtgacatcagtctgctagaaggcactggccttaggacatcgggggttggtgcccaattgttgtatagcaggggtgtgaagtttatggaggcacaagaggagaaggcacaagaggaggaagttttgagaatgtgtttaaggtgttctaagggggtattgggaaatttaaactgtagcccatcaggttatttgctgatgtttcttttgtggtgagggatgaaacagtcaagggctcagttgtggcactcttactggctaaggagtgaccatgagagagcgggctggtctgggaaggatgaatgtaaccgtacttagcagaagaagatgggaagatgtttttgtttgaagtatttttggaatttattattaacatcggagaaagagggttaccaccaagtctcacataggagcaggctagctaggggaaaggggagagtagggtgaccacaattactatcaggtagtaaagaaggcaattaagattccaagctataaagagcccattagcgggggtcgggggggcatgcctttaatcccagcacttgggaggcagaggcaggcggatttctgagttcgaggccagcctggtctacagagtgagttccaggacagacagggctacacagacaaaccctgtcttgaagaagagaaaaacaacaacaacaacaacaaaaaagagcccattggctgaatcatctgatttatctgttaatatcctccattttcccgattcctttctttaaaataataaacatagaggaactccatggcctggtggattcttcattgtgttgagcatttagctgcttctgtaccatctgttttagtacctgtagtttattctaataccacaggcctttgtcctcccatataggtttgccagctattttaaaggtagggcagacggtacctttgaaaggccaataccgggctggagagatggctcagtggttaagagcagcgcctgctcttcagaaggtcctgaattcaaatcccagcaaccacatggtggctcacaaccatccgtaacgagatcagactccctcttctggagtgtctgaagacagctacagtgtacttacatataataataaataaatctttgaaaaaaaaaaaaggccaatacttgttgtgtccagcctatggacaacctggacagtctgggactgttcttgataatacctttttttttttccagaagccctcttcccttttttaaagatttacttactttatgtatgagcgtacattattgctcttttcaggcacaccagaagagggcatcagatcccattacagatggttgtgagccaccatgtggttgctgggatttgaactcaggactctggaagaacagtcggtgctcttaaccgctgagccatctctccagccctcagaagcatcttttattctatggactatttctgagattgagagaatgctaatctgtcttctattgctgcaacatatcatacccccataaatcatggctatcttggccacatagctttaatttttctatgtgaccttctgatccttaagtaagcatctcacactttgtttttttcctaggataatgtcccaacccctagaaacctcccaaataggccacaattctggtaaaatcattgttacatctgcttttgtgtctatcaagcctttaatttcagtatcatttacaataaaccctttaattttggcctctgatcatcagcttgtcaaaattcctgggtttttttttttttttttttttttttttttttgtctcttccaactactgaagccagtctgacgttgatatctgggctgttgatggctgtctccagaacagtgctgtttatacactctacagatgagtttctctggcctgaaatggttgacttgaattcaatacaggggccagcaaaaggttccctagggtctgtcccttgctggtgggcattcattagtccaatgccagcctttgccacatcttctgtgtactctagaaggctcaggccttcctttggaattagcttggctttgcctacaattcctttgaaatgaccttgcttgtcacagtgaagacatttgagtttgggttttgtttgtttgtttgcttgtttttcgagacagggtttctctgtatagcccaggctgctgtcccggaactcactttgtagaccaggctggcctcgaactcagaaatcagcctgcctctgcctcctgagtgctgggattaaaggcatgcaccaccatgcccagtgagtttgggtttacttaaaacctttggaggttacatctattacagttacataattagtacgagatccaatatcagctatatttttaatccatctatttattagtgctgatcttgcctttgaggactagtcacccttctgcacatagaactagcttttttttttttttaagatttatttattgattatatataagtacagtgtagctgtcttcagacacaccagaagagggtgtcagatctcattgcggatggttgctgggaattgaactcaggaccttttgaagagcagtcatttcccttaccagctgagccatctcaccagccccctggaactagcttttttttaaagtaaaagatttgattaatacttgcctagcttctgaatcagatactttaatttacatttgaagtcaatctttgtaaaatatcagtgaatgcttcctttggaccttgtataattttagtaaacacatcagaccattttttctgtttcttcacccttgttccaagcacttaaaagctgtggtgttgccagattcaacctgcatgtgtacctcagcatgctgaccttcagctagcagttcattttgggaactgctgatacctgagccccatttctgtcctatcctcttagcctctcctatcacaatcaccactgagactgagggcctgcctctaatactgctgttgtcttagttccagtcttggaggattactctattttgaactgcccaagaatttagtatctgcttcacatatggcagatacatgccatatgaaatgatggcttctttaaattctatatctagcatttctacagcatgccatccaagttcttcataaccttgaaggtacctatcatctgctgctatttgtcatatagtagccagataagctaagcttgattgtctaacaacttttggctgaccttcagtttcattatatggtggcaagtaggctctagtctcaattcctctgtctgtaaatatctttctcactctttctagttttttttttaagatttatttatttattatatgtaagtacactgtagttgtcttcagatacaccagaagagggcatcagatctcattacgggtggttgtaagccaccatgtggttgttggatttgaactttggaccttcggaagagcagtcgggtgctcttacccactgagccatctcactagcccctctttctagttttttgtgtaaggcttatgtcttatcaatctgcttttcacaattttacttttctctgtatttctaaagtctttcttttcgagggcacagaaagctactctggctattaagactcaaatatgagccatattgagccaatatcaataaaatcatctattctttttttctttctctaaagccatcatgatatttcccattcttatgcagcttattcttttttggttttttggttggttggtttggtttttcgagacagggtttctctgtgtagccctggctgtcctggaactcagagatctgcttgcctctgcctcccaagtgctgggattaaaggcatgccccaccacgcccggcttattctttttttaaagatgtatttatttgggctagaaagatggctcattggttaagagcactgactgctcttctgaaggtcctgagttcgaatcccagcaaccacatggtggctcaaaaccatcctaatgagatttgataccctcctctggtgtatctttagacagctacagtgcactcacatacataaaaaatatatataaaaaaaagatttatgcactctttccaccatgaatagtctagacaagcaaaggctgtctccttcctgaaagatggtcatgggggaagtccttggtcacacagaattgtacaagtctcccgcagaaggcctttccacgcttctagagctaaaccagcctcccaccaccctccagggctcatctcaggccctccactccagttttcaactcttcgcagttcccagcagcatctgtgcacccaggggtctgagagccacaggctagggcctgtgggaagccgttgcagagtggcagttacagagtgacagttacagagtggcagttgcagagtggcagttggctatagctggccaccacacatacatagccagtaaaggttcttttgccaaggtgaggttttgagaattgacaaaagttaaccaatcagatgagagacaagttaaccaatcagatgagagagaacgcctgtcctaggcctataaaagcagcaccagttctgggctcgaggtcttttcgcctctacaatcaagctctcccaataaacatgtgcagaaggatcctgttgcagcgtcgttcttcctggccagtcgagcgcgcgcaagaagggcccatatcttaggctgtgtgggtgatatgtcagaggcatcacatgaacccggcatcccagtggggagagagagatgcagcctggtgcccctgcgtttcacctccccaagcagcagtccaaccccccagcagagaaaccaaatgcagaaccacaggggtttctaccttggaccatttacttccctgataaaagaaacagacaacctttttatttataacaagccttaatcagcacaagagctgggcagatatctatcctctacactagtatgcctactccccagccagtaagccatcatctaattcctcatgtttccatctgggctgctcttaactccaattagccaacccacatagccatcattccacaactcacccaatccacgcccgcttcctcctcccttcaccttctcgccctcctggtgcttctcttacaaccccaagctcaggaaccctaaaccccaccctggtctctcctgcccagctatcgactgcaggcatctttattcaccaaccagaagtaacttagggtcaaggtcacataacatcacttgggtctctggggcaaccagggcttgcactaagcattccaaagcataacagaccaaagctcaatatatatcatctatataaaatggtaaccacaaagagacggcaggctctcttttccttttaaagccagttagatttccaactgtagttaggtaatttacaccaggattgtttgtgttcatagtgaggggtgtctgtacattttggactggtctgtaccttgaaggaaaaagcgccctttcataggggctttcttcaaattggctttagctaccccacccccaccccccgttgtcagggtggctgtggattggcagcccattcttttttttttccgagacagggtttctctgtgtagccttggctgtcctggaactcactgtagaccaggctggcctcgaactcagaaatccgtctgcctctgcctcccaagtgctgggattaaaagtgtgtgccaccacgcctggcttggctgcccattctttatggcttttctgagactaaacttaaggcctgacctagcagcctgtcttaaaatggagtaagttaggatcactctctctcaccttaagagtccatctcaaacccttgagcagaatccaagggttagcattttaatacgtgtcggatggtggagacctggtccttgatgaatccatcagggggttaacaacatagagcttgcatatcacaatgagtatgaccaggcccaagaatccagacagagttgcaataactgtaatccaaacaggctgaccctgttccatttcccttttcctgtcttctagacgtttcctcaccttagccaataactccctcgcatgctttaagttatccacaaaggtgcagcaccttttctccagaggtttacacagtccatcctgttgcagagattggaagtcttgttcccgctgatttcgaagggtggcctcccttagagaagttaatgaggttttggacttggataaggatttccctagttccattaaatctgcatctatggcagagcttaacactttataattctcatcttggaagtcgaaggctgatgcacccaggatctcggcaacagtagcccgcttcgctcgagcagctgggaatggagatagtctggtccccatctcatcagagtaacgaagaattctaggggcaagctggaccagtacacaaaatccatttgtgaggttaagagcctgggtgtggatgcaagatgtcagcccagtagtgcatgcccaccatgtattgatggggggtataatgtaagcatccctgtctggggcttcctggatgctattacataaatgtctatgggtgtggggtattgtcccaaagcagagtccttttccctgaattagctctaaggttagtctccctttacctggatactgccaacgacagtccttgttgtcagtagaggtggtataatttccaggaacggctattccttcataatagggtggctgggcatccaagcagagccaacatttacttgtaagctctggtttagaattattcaataccaggtaagtggccttaagcaagtcccatggcccagacctgggtctaagttcctgagaaatggggactgtgatttgtgattgagtcaccgtgagtccaacagggggcagggctggattggggcctaaaggcatgccctgtcgggcagagagttggatcgtaaacattactccatagtcatatccagacacatacagtcttagtccccatgtctttcccttttcccatcctacgctttcttttcccttgggggtgaactgaactgtaatggggttacagttggaggaacatggcccaccaagatcatttgcatccagcttgggctgcaatccatacccccatccttgggattccgatccagggctcctttggaccttgatgaggtcatcttttatcggtggcgtccaggagatggacccagtcgactcacaaccccaatatgcacagaagtatgactctggtcctccacaggtagccgtctgctgtggagacctcccctctccagggcagacatagaagggggttctccgaagttcactgtgttgagctggatgttgacacccccatacaaggcccaggggatcccaggtcccatccgctagtgcacacaaatcaaaaacaagatcaggaaaccaagttccaatgggggcgaggtgggaggtcgagttaattacagtccccgtagcagtgttagttataacccaagtaaggttatggggttcatggggcataggactagtttggaccacacctatagaaatcagcagagtcaagatctgcagtgtcttagctttagggaatcttatggttgtcattggagtcttgatcccgtctggggcacttggcagcatctcccgtctagtgatcgagacttcatcacctggttggaaacaatggtggttaggtgttgcatagatctgccatgtttggcccaatccatttctgtaccttgtaaaggacctgtaagcactcttgtctacagctggcatgaagtttttctgcctgatttctctctccgtgtacttttgaataatacaaagacaactttacacagtacacaagagattatcccaacaggcctttctcccccaacccccctttcttttcttcttctttttttcttggtttttcgagacagggtttctctgtgtagctctggctgtcctcgaactcaagaaatccgcctgcctctgcctcacactcataagtgctgggattaaaggcatgcgccaccactgccaggctagcagtggcctctcaaaagcactgcgaacttatgttttccctctaggtttgagctttagtagaccagctggagtgcttctgcctttgggtcccctgcccttccttcacgtgactccatgtcaggcagtgagcgctcagcacctagagcccctttcctgttttacctgggttagatccgaggatcttccgcgaactggcggtgcactccgttaccaaaagcctgacatggccttgagcacaccccatcagtacgctttctaaaagcataagataaatacaagcaagagacgcggaacgcacggtgcatttaccaacgccagggaattaccaacctttcattccctacagcaacagctcccagcagccaggcactgcttgtgaaagacccccaagctgggtagtcaatcactctgaggagaccctcccaaggatcagcgaggccacgattcggatgcaacagcaaaaggctttattgggaacacgggtacccgggcgactcagtctatcggatgactggcgcgccgagtgtggagtacttacccttcttatagggctagggctggggggcaaaaagcgcgggtacagaagcgagaagcgagctgattggttagtttaaataaggcttggggtatttcccggtcatttggggaacctgaaactgaggtgggactttccagaaactgttgctggtttcgctttatctgagtaccatctgttcttggccctgagccggggcccaggtgcttgaccacagatatcctgtttggcccctgtcccggtattattcagccttattctttaactaaacttccttgtaacttttgagaactcagctctggtactttatcatgccttgcaaaatggcgttactgcagctaacttgctaagccttatggtggggtctttcacttggagcagcccgagattctgcagctcgccctgcaaaaggcggaaacctgggaccaagcacgcactccagacactagggctttcgttttcccgcgctctagacacgaagaccccgggctgcccgcggcggcgcctgacccgagggccacgggctgcccgcggcggcgcctgacccagacccaggctcgtcccggcacgcgggttcccgtctccgtgctgcacgagccactctggcccctgcttgacccgtccggcagcggtgggccgcgcacggaccctcgggatcgcgcacgcacaggcggggcccggcagccctgcgaggacccgagtccggaaacgtgcgctgtcacaaagggggggacacgtgggtgccgctgtcccggccgcgttctcccgcagcgggagagctgcctccgctgcccgccacctccaccccggccgccctgtggggccgcggccgtagccggccgagtgtgatcgccgccttcagtacgtacacgcggcgcggcctcccctctccaacccgagggggcgggcgatcggggtcccgcctcctcctctaggcgctgctggcggctgctcggccaggcctagggtccggccgggcgcctgcgtaccttgcagcacgtgctcaggtcccctcctcaatctgccgggtctctcctcaggtcactgcaccgcgttcggaccctgcacagccatgtccatcctctacgtctctcctcaccccgacgccttccccagcctccgagccctcatcgctgcccgatacggggaagctggtgacggtcccgggtggggaggccctcacccccgcatctgcttgcagcctcccccgagcagccggactccattccctccgcctcgcctgcccgccctggagcagggacctggcggcctgtgggtgtggggggccccggctgtagctcagctgttgtggcctgcaggcctggggggacccgggggcagccgggcagctgtcctggtccagcagtgggtcagttatgctgacacggagctcatacccgctgcctgcggggcgaccctgcctgccctgggacttcgaggtcctggtcaggatccccaggtgagagggaagaaaaagggagaaattctgactacacaaacaggattgggaagaatcccacgaaaaaagtcggttgtcaggcggtcgcatctctgcctgccacctggtgtagtaactttgggaacactttttctcgagccttggtcttctatgtctgagaatgcaagatgatgaaatctcttccttcctccgggggtgtgatacatgagcgcccgggagtggagcgtggttttgctgttttcactacgtttggagtgtgtgtgtgtgtgtgtgtgtgtgtgtgtgtgtgtctttaaattaggtctcgctctaactgaatggctcggaacgaacgcactggtgtgccaagcattcccaagtctgtctttgggtttctgttgccatgtttaaaacaacatgaccaaaagcgccttgggaaagaaaggaattgtttcaggttacagctctccatcactgaaggaagtcagaccagtgactggaagcagaaacaaaaagaggccgtgcaggaccgatactttctggctcactttccacagcttgttcagcctgctcttttataccgtccagggctgctttgccaggggtggtatcccctacaatggactggccctccacataatcattagttaagaaaacgtccccacacgcttacccacaggccagtctggtggggacattttcccaattgagtttcccacttcgcacgggccactggcttaggtgaggttgacaaggccctggttggcaagtgtgacagggatgcaggatgtgagcggttttatgttgaactgtagggaagactggggagagatgacagttgctgggaggagtcagaggaggcttgaagttgaaggagaggcagggagaggacagatgacacaccagattgtttctgtgagtccttccagggtagacctgtgtctgccttaactgaaagctctgcccctgcagggtagggagtgcatggtggctgcctagtgtcacttcagtgggggaatgaaggaacagtgcagatggtgactggcttcttcatatctggatggactaacagagagcctcattcctgcggggtagtacttcagacctgcgctcatttgtggttttcctgggtgaaatctattgatgcccagacctggcagtcttgtttcatataatcctttaactttagagcctgatatgtttccttggactcataaacttaagtgtttagtgataacttgttggataaatcacacacacaaaatacttgtgtgtattcgatttttattttatgtgtataagtgttttgcttgtgtgtgtgtgtgtgtgtgtgtgtgtacacttgtgtgcctagtggccaaggaatctggggacatgtaacgaggtgttgtcataacttggtttacggactgttgtgcaccaccatgtgggctcctggaaccaaactctctaagagcagccagtgttacaaacgctgatctgtgtcattcacctctccagtcctataatgtatataatccaggggcctcctgcatgctatgctaagtactcttccttgaactttcagccagactagagttttgttgttgctttaagacagggtcttaactatgtagccttacctgaagtgggactggttgtgaagactagcaagctttaaaggcagatccctctgccttgccttcggagacctagggttaagggcatggtaccacacccaggagaactatttatagtgaccttgtgaatgaggaaggaaggagcctgagacctggtggtcagtggcttgagtctgggaaggtcgtggacaggtggagtagtggctcttaaccttgcccaggtcaggacccttctgaggggatggaaatgaccctttcacgggggtcaccaagaaaaacattgaaagacagatattaagattcattaccatagcaatgccacagttatgaagtagcaacaaacgtaatggggggtcatgaccctttcacaggggtcgcctaagaaaaacattaaaagacagataatgggctggagagatggctcagcaggtaagagcattgactgctcttccagaggtcctgagttcaattcccagcaaccacatggtggctcacaaccatctatctgtaatgagatctgacaccctcttctggtgtgtctgaaggcagctacagtgtacttaaatacaataaataaatcttttaaaaaaacagacagatattatattacaactcattaccacagcaatgctacagttatgaagtagcaacaaaagtaattttatggtgtgggagggtcaccacaacatggggagctgtagtaaagggtctccgcattgggaaggaccactgagataagggtgtaagcctgtcataacactatcctttcctgttaggctgcccttggggccctgggcaaggccttgaaccccttggaggactggctgcggctgcacacctacctggctggagatgcccccactctggctgacttagctgctgtgacagccttactgctgcctttccgatacgtgagtcactgagcttggggagggacaaatgcgtgcccgttagacctccttacacggtgactacgataattttttggttcggtttggtttctcgcaggttctggacccttctgcccgccggatctggggcaatgtgactcgctggtttaacacttgtgtccggcaaccggaattccgggctgtgctgggagaagtggccctgtactcgggggccaggtctgtcactcaacagccaggtgaggaggatgggagacagcagagggcacaagggccccttttatcttgaaatcctggggccaccatctggtgtggaggctttgtagggtgagggtcaaagatgatcatcaagcctgaggcaagagctttagactcagcactcttcacagagagtccccagcaaccttgagtctgaatttctgtgcttctctccaggctctgaggtcatcgcaccccaaaaaacacccgcgcagctcaaaaaagaggcaaagaaacgggagaaactagagaaattccagcagaagcagaagacccagcagcagcccccgcacggagaggtgggggggccaaaggctgagcgggagtgggtggagccttgttggggaggctcatgtttgggtctgtgtcttcttctgaacagaagaaaccaaaaccagagaagaaggagaaacgggaccctggggtcattacctatgacctccctaccccaccgggggagaagaaaggtactggctggggaagggcccagctccggccgctgctgtctcggttcctctgtgctgtgtgtgtcctggcttccaccctgcttagtgagggatggctagcctcaggctggcctgtggggagaatggcaaacggcctgttgcttctggcctaactcagagtctttactgagccctctccttcctcccagatgtaagtggcgccatgcccgactcctacagccctcagtatgtggaggctgcctggtatccatggtgggagcggcagggcttcttcaagccagagtacggggtgagtggttactgctgcccggacccagagggggctggaggtggagaagggtgggacttcaggagccgtgcctgggaagggatgccataggctttagcatctgcccctccttctccaccaccagcgtcctagtgtgtcagcaccaaatccccggggtgtcttcatgatgtgcatcccaccccccaacgtgacaggctccctgcacctgggccacgcactcaccaacgccatccaggactccctgactcgatggtgagctcctgtttgcgcctccagccggtgccttctgccctgcttggctccattctctctgctgactaggctccctctgccacggtggccttgtctggccctcaggggtgactttcctgcttgctcccctctgagcgttcagtagtctttcctgttcaagtaatctgtcagcgaggctgacttccacaggttccttctccctcccgtctgtctcctgagaaggatgttatagccccactgtcgaagcactggggaccgggcctgtggcctgtagacaccaagtgctcagtctaccttagacccgcaccattggtctgcagcaacgttcctttggattttaacggcatgagcagactcatgttgaaacgtacatctccttgaccttcctactcagacctcctcccttccagagtggagtccttgcttattagcagtcaaagtacatcttcccaggtctgtcctagctgtctctgtgtatctacatagaagtatcattcagtgttctttccaggatacactggtccttagatgctgagggggaagtagtagtttttctttcttttttttttttttttttttttttttaaagatttatttatttattatatgtaagtacactgtagctgtcttcagacactccagaagagggcgtcagatcttgttatagatggttatgagccaccatgtggttgctgggatttgaactccggaccttcggaagagcagtcaggtgctcttacctgctgagccatctcaccagcccctttctttctttttttaaaaagatttatttattttgtgtatgtgagtacactatagctgtacagatggttgtgagtcttcatgtggttgttggaaattgaatttttaggacctctgctcgctccagttcaactctgctcactcagtccctgcttgctccagcccatagatttatttattattatatctaagtacactgaagctgtcttcagacacactagaagagggcatcatatctcattacagatggttgtggccaacctgtggttgctgggatttgaacccaggaccttcggaagagcagtcagtgctcttacccactgagccatctcgccagcccttttgtttttttcaagacatggtcttactatgtaggtttatctgtgctgtcctggaaatgactctgtagaccaggctgactttgaactcacagagatctgtcttccttggcttctcaggtcctggagggaaggtagttgttattctagaccaatcttcccttctattttactttcaaagtttgacttaagttatatgtgtttatgtgggtccgtgcacatgagagcagatgctggcagcagccaagggtgttggatgctcctggagttaggggtggatgtgagccacgatgtggcgctggaaattgcactctggtcctttggaagagcaacacatgttcttgataatcactgagccatctccacaacccctcttccttcccttcccttcccttcccttcccttcccttcccttcccttcccttccctttcctttcctttcttttagtagaaaagatttaaatctaaccagcaaaagttgtaactccgagttggagaagtggttcggcagtaggtttggttcctaaaacaccaatatggtgacttgtcaagcgtccttaaccccatttccggatccatgtttgtgtaggcaaaacaatcatttataaagttaaaaaaagttttatagccaggtgtaatggcaatgctggcaggagtgtggccagttcaaggctagcctgggctatgtagtgagactatagctcaaagcaaatatacagagagttgttccttagctttttcccaatgttcaacggtttctcttgggcgtgtttacttgttcttgtatacaggctgactttgtttttattctttttttaatttaaaaatcatcttaaaagaattaattgtatgtatgagtatactgttgctgtcttcagatacaccagaagagggcatctgatctcattacagatggttgtgagccaccatgtaaatgctgggagttgaactcaggacctctggaagagcagtcagtgctcttacccgctgagccatctctccagcccctaatttaaatttttattaaatgtgtgaatagtattttactgtataatgtaccacatgagtgctttgtgcctgcagaggccagaagaggaagttggatccctcggaactacagttagagacatttgtgagtcactatgtgggtgctgggctttgaacctaggtcctttggacaggcagccagtgttctctttactgttccttgagttgaggtctcatgttggctaggctagcctgcagctcctggtgaccctcgctgttgatctcagtagctgcgactacgggtacatgctctggagtccagctcctgatttatttatctgtgcattctgttttctgttctttgtgtactagtgttttgcctgcgtttatgtctgggtgccgcttgtgtacagtcacagcaatcccttgggactggagttagatagtcgtgagcagccctgtgaagctgggagagagcctgagtccttgagatcctcagcccatgctcctgaccgctgcaaatgtaaatgagcaaaccttccccaggccaccctacccccattttggtttttgttttgttgtgtggcttttaaatttcctgtcttagaggttagtagcccagaatggcatcaggctaagtgagttaggtgaccaaggcagaccttgaactcccgacaatcctgccttctaacaaatatagggagtgcacacatgagctgttctaccctgattctttggtttggtttggtttttggtttttcgagacagggttgctctgtgtagccctggctgtcctggatctcactctgtaaaccaggccttgaactcagaaatctgcctgcctctgcctcccgagtgcggggattaaaggcatgtgtccggtacccagaatcatttttaacagtaatgataccaaaaggtgctgtttttctttttttgagttggatctattgtagaacttgctttgtagaccaggctggcctcagactcgcagtttgcctctgcctcctgggcagtgagattaagtatgtgcaccaccaccgcctcgtttcttaaagcgtattaaatgcttttaatacgttcctagcgtatgttaatgctctccaaggcgtttgtaaagacgacttcttgccatctataagaggatggactttctacaatctctttccacagaaaatctgagtgtagtgtgataagcaggcttgaatatattactcactttattatgtattggtcatggtccacaaacatgcgggagggagctgtgaagatggctcagtggataaagcacttactgcaaaaatatgcaaacctgagtttgaatccacaggacctatgcaaagctgagtgaacatctgtaatctcagaagccccagaggtcactggaagccagctaagctt

SEQ ID NO: 87 - DNA, 130427 bp, Mus musculus
gatcctttccagccacgcggcctgcgtggaatcccagacccagtagggctcacaggcatctgatctcaggctaccctgagtcaggagtcacgtgccccttctcaatataataagagatcttctctaggctcaagtctgcttagagccactcatggggacagatttgaaggggctgcactggtcttcccctcttcactacccaccaagtcctctcagtcctagggaaagcgcacctctcttcctgtcccatctccagacctacacttggcactcctgtggtcacggacacaccagggtcacagatcagtggcacaggccagtatgtcaagtttgctttatcttggtgagagagagtactggggaccagatctgctctgaagagaaaggaacattcccattgcttggggaacagatcagaaaaaggaagtggttttgaggctccgttggtggggtgcataccaaggccccagcaccagaaaagctgtaaagaagaaccaagttgttaggaaggcttgactggaatcaactaaatggaagtacattggaggaataattaattgcttgctgatagtaacgtttgctggatactatgtatgtgctaaacatttcttgtaactgaatcttgctagcctggagcaatggtgtacatttataatcccggcatttctgtgtttgtgtatgtgtatagaagacctctggtgttatacttagggaggggcaattcactttgagcttttctttagcttttttgagacaaggtctcatgatgtctctctccctgatccagctcactatctaagccaagctggctttgaactcagagacccacctaacttgagtgccaggattaaaggtgtatgccaccacacctggaactgccttggatttattttatgtattcatttacttagataccctactaggacccggaagttctctcttagtttgtctaggcttcctggttatgaagcccctgggatctacctgtttctattcctcattgctgaggttacaaatgctgttctaaccaggcagtggtggctcacacctttaatcccagcacttgggaggcagaggcaggcagatttctgagttcgagaatagcctggtctacagaatgagtttcaggacgactagggctatacagacaaaacctgtctcaaaaaataaaaacccaataaataaataaattctgttcttttgtttgtttgtttaggcaaggactcactatgtagtcctggctggactcgaacttgctatgtactctgagttggtctcagaatcagatctaccactcttcaccccctgagtactgagattaaaggggtgtgccaccgtgcccgggcaaaaagttttaaatttacatttgtatttaattcaagtgcgagtggtgcacacacacgccacggtgcacatgcggaggtcagaggacaacttgcaggaggagttggttctttccttccaccgtgtgggttccaggaatccacaaatcctggttttgtgccaagcgctctcaccttagtcaattacttgctccctggattacacaatttttttaaacctttgacatcttagtgattcagttgttttttgcttggcatgctgggtcgagggagggttaagaagaaactctaaaggacagctcttgaatggttgacattgtcactgttaataagaataaatgtgactcagagctcatatgtccttctgtcccctagcccagggaactgtggggcgtttatacgcagctctcagattctgcaggacaccttcagacaggcagtgcgtggagcccagagctgagcctcagttctcctgcataggcttgcctcctctgtgggtcatctgaggacttggatttagggattgaatgtggacagagctccctggcataaggctcctgcaagcaagtggccttattcaggatttctgtcccttcatttttttttttttcctctttctgctcattcggcatggagtagcctcaggcctttgccactctgtgttgagccttctgtaacgtgacatggactagagtgtggccagactgcagtgtgactccaggagatcacaaaccaactagcatttctcccttagtcccagtgcagtcaggaagtagtccctgctttgccttagcacattctctgctgagtggggttggtttgtggcaggatttccctatataattcaaacaggcttcaaactcagatccctgccttggtctccaatatttggtgacaagagtcactgactatgaaacctagacaggacctttccataaatctaaaggacattatagccccttggtggactctggcagccctgaggtagtccagctctgggggtgcaggggagctatgacctttctgtggcaagtgcctcgctgatgggctgcttaccatgacttttccagtattagcctcctggctctctcaggaagctagcctagaaaaggcctttatttcagctctaggtaaggcagacagacagacagacagacacccccccccacacacacactgacagtatcaggatgtgaatccctacagcttgagaggcagccctggcagttcagagcagctctgagtaacaaggccagcatgatctctaggaacacacgaaggagccggtccacacccagtcagggcatggagccaggcactgtggggatgcagcacatcccaacaaatcaccattcccaacaggccctgcagctgaacaaggacaaacctctctctgaagatgtgggtataacctaggacctaagaggtcaggacagtctcaggttgcatccatgggggatggggggagctagcacagcaagcagacagagcactggaggaaattttgctttctccatccccaactacatactgtgtctctctgtaaatgaaacctgagacaagccaaagtttagtttaaaagcccagggcagctgagtctgtggttccagcactagggaggttaagtctgcaggctttcgagttcaggctagcccaggctacatcagaagaactgattcaaaaacaaacaagcaagcaaaaggccctcaaagctgcagggagaaagtaactggacttgtgttctctgagccctcgaaagtcagcagaagctctgctgtggctccctgaattcactggagactcctcaggattgggcagggcacctctcagccacaacaccagctaccaccaggctttgggccagcagacacggtgacaagcggcagctacagcccttcttgtagaaggtgagtacagagggtatcattgggctatcctggggcaaccacatctggcccctgccaagtgcccagtgacaggcaccaagagatatgggaaagatgcccacagactggggtgtgcgacagaagtcacagtctcaagccactgcccctgctggcccctccattttcctggtagatacttcacttgctcacttacttagggcttttaggcagaatctgactatatagccctggttgtcctagaactcactatgtagaccaggctggccctgaactgacagagatctgcttacttttgcctccccagggctgggtttaaagatgtgcaccagcgtcgggcagtggtggcgcacgcctttaattccagcccttgggaggcagaggcaggtagatttctgagttcgaggccaacctggtctgcagcctaagtttcaggacagccaggactacacagagaaaccctgtctcaaaaaaacaaaaaaagaaagaaagatggataccagatctctctgtgtgtgtctctgaatctgtctctgtctctctcttggttttgtgagacagggtttctctgtgtagtcctggctgtcctggaactcaagctggcctcgaacacacaaatctgcctgcctctgcctcccaagggctgggattaaaggcgtgtgccaccactgcccagctttttttttttctctctcttattggcaggatctctctgtgaagctctgattaccctgatactccctatgtagcccaagctgaccttgaacttgtggcaaccctcttgtctcagcttcctaacacctggcacctgggatgacaggcgtgacccacttggtcacctaatgggcacactttataacaaaaaactcactacagggacaaaggtctgtatctcccaccctctggaagctgagacaggaggatccttgaacttatgacttcaagactaacccagccatagttgtaagattatcttgaggtaccttgggggaggggaagaaggaaaaggaaactggcatactacattaattgaaatttactctggtgccaggagtggtggcacacgcctttaatcccagcactcgggaggcagaggcaggcagatttctgagtttgaggccagcctggtctacaaagtgagttccaggacagccagggctatacagagaaaccctgtctggaaaaacaaaacaaaacaacaacaacaaaaagaaatttactctgaaataccaaaaagttatcattccaatgtgtaatccatataacaagtctaggtgatcgacagtagttctgccaccggctcagaaagccaggtgtgcttgcatcccagacatctgtcacaaggaaccagcccactcatggctcacagccgtgataaaggccaaggctgctctacacccaaaggtggaaggatgttatccatcgacaagctgggagtaggaacagagggaaccctgaggcaaggtgtgaagagaggtcataggcataaaaatctgggatagcagagaacagaggactggacaggtacaggccagtcaggaaggctgtggagaccggtgggagtatgcaggagcctgacattgctagagttcaggataggttctgtggtgacctctggaggaagattgggtggaggaagaggtgggactgggccccagctggaggaacagctggacttgaggcttcaggaaggcaggggaagggctgctttggttgatggaggaggtgacaagagagtagacagaggaaaggtcactactgaagtgtccatcacttcatatttctaccctgacaatgccctgggtcacctgggtgctgggcacacgacctatacctgtaatctcagcactcaagctgaggcaggaggattgccttgaattccaggctagtctggactgcagagtgagacctgtctcagaaaataaagagaaaaagagaagagggaagaggaaggagatgggagaaaggataaaggatcaaagagaggtcaaagagaggaaggagagaagaggaagaagcgacctgggaggagacaatttttgacctccacacctgttaggcaggagggctcctagatttcctgaacccctgcaatgtggtggatagctctcaagagggacttgagggtcttgtgaaccatgggtctgtttccatagtaacccaaccggagactctccaccagtaagtcagtctttctgggctacacagaagtcactagtccatggacagcagatagggatgcaggcagctgtaggaagggagaccaaaatcctggagccaggctgcggtaggaaagctggcctcactctgtgtctagttgctggggttgggggagactgccccagcagtcagctgtacccacttctcctcagggacacgtttcactgaggaggcagatcacgttgggtccctgacttctgcagcggggaggaccgagcaggggctggaccacctacgtcttgatggacacagcgctggcgttcctcccaggctcagaatgagccttttgttctcgggactcgctgcctttctgaacccaggctaaaaattgcttcagttcttcctggagttactcattgcctggtgactaatgcttcggggtctgtcaatcttaaaatcctgtcgttagttctcagtgttgggtctcaggaacaaaagctgaagaggtattcaaccggaagtgaccagagacacttcctgcttaagctgcaccttccaaagagtgggcagtattgattgcatggcagcacagtggcggtgataactttcggaaggcagtggcctgttactcatctgacttcccagaatgcaatttgctccctaaggcagtcgcacaagttgactttgtcttaaattattttgtgctgagatctgctgagacacaagctgtgaagcagtgtctgagatggggcgggattcaggtgtgtttgtgtggtggctctctcgagactcgattagccaagttcaaattctttgtctcagcctcatgccctcttcagccttatcattcaccaccccctgtttaaagtactattgctccccacaagccagttggctgtgtcctacttcccacaagactctcattgttgaaacagacacatagatgacttctgcagtatccaagtcaccccaataggtatgtgcatttgccagtcatatctttaatcccagtacataggaggcaaattcgggcagagctttgtgggttcaagtccagctgggtctacttagtgagttctaagcctgctagggatacacagtgagaccctgtgtcaaaggaagaaggaggaggagaagtgggaggggaaggaggaggaagaggaagaagaagaaggagaagaggaaaaaagatgaagaggaggaggaagaggaagaaggagaaaaaggattttcttgttgtgcaagtacttacctataatcccagcactcatgaagctgtggcaggagaattattaatcagagatcagcattggcgacacagagagtctgcctcacaaaataaggccagaaagatgcctcagtgggtaagggtgcttgcagctaagcctgatgacccgagttcaatccccatgacctacctggtggaaggagagaatcaactcccacaatttgtcctctgacctccacagcatttctaggtttagctctgaagtgcaaggcctccttgactaagaactccctggcatccatccagttgcacagccaagtaagtccctgtctatgaggacatgttcctgccttcatccagccaggatcctgtgcccagcagcctgcagaacagagatcatgagagaggtggttttttttgcggggggtggggggtgggtccaattcaagcatcagagaaaagtaggacatgctgaacagaggaggtggggggagaagggaggaagcctcaggtgctgggcagggcacagcattagtgatggggctgagttgtccccttcccaggtccttctacctacatccctgaggggttaggaggtatctgtgacccctggtgggtttccaagttcaagagccaatcgggtttggcacatatggtgtcaggccaccctagctgctggggctcacatcagacccctccagccccagtgaagggctggtccgtccagcagcagatattggacttcttttagcctttgcagacctctgtagcagcagctctctgggtatgcaggaccgctgccctgctgggggctggaatgaacctggagggtggccattcctgaagccttggaattcctctaagttagctttcaccttgtgtctggttttattgaatctgatatgcaaggtcctggaatttagggcatttaatttcattacatttttgtttgtttgtattagacaagagtttctctctacagctctgtcccgcctgcagcttgacaggtaggccaggctagtttccagcttgatgcgatcctcctgcctctgcctctttctcacaagtactaggactacagtcttgcctcacaatgcctggccaaaagttagtttgtatatgatggttataggaattgaatttaggactcaggcttgccatacattctgccctgcttttagttttttgacacaggattttgccattagaccaggttggtctaggaatcccagtggtctttctgcttctgttttgtaaaggtaccaccatgaacagattcatgtcttggctgctttagaactcatagcaatcctcccatctctgcttctctagtgcttggattgcaaggagagtgtgacactaaacataaggtgtcacatgtggccaggagtagaggctcagctcatggctgtatctctgagtggagggttagcaaatggttatctcagagggcagaggtctggaagctatctcaggtggaatgtggcccaccattcactccaagatgcaagacaggcgtgtttgtgacttgaatcatcaacctccaactggaagccaagccaagcatctaggaagggctggtccacagagccttaaactccagaaggtaggtaggtgtgcactataaaaatgtttgccctcatcaagaaacaactagagcattacaagttcaaaacagccattccccagccaaatgaaacaaagtccactccatagggagggagcgagtggtctggtgccaaggaccagcctcagcttgcgttctcagggaacccaagagtgtctgagagccatgaaacaaaggacctgaagtcaaatcgtggatccaagctggcgacctatcttttgcttgagacagcttcccagactgctttctctccgctctgtttttttgtgttttttttggagatctctagatagctctctctccctccctctctctgtctctttctctctccctctccccctgtcctccctcctcctcctcctccccctccttctcctcccctcctcctccttcccccctcctcctcttccctctctctctctcccctctctccttctctccctctctctctcccattctgctcaagacagttttccaaacagttctcttactattctaaaaaattctttgcatagctcatctcctgcagatcataagcccaatctgttattttacttatcaatccagtcatttactccaggtttccttttggtttgcccatgactccagccccttaattcttagaagaaagcaagcaagcaagcaagcacacacttttttttttttaatattgcaaaaactttcagaattctgcctttgcacagacttaaggtagctgggtggaatcccgccctgaaattaacatttcttccaagtctgggtctgaacctaaattccctctgtctggggcagaccttggactcaggaatctgtctgctctttgtaagcctaaacaaaacaaaacaaaacaaaacaaaacaaaacaaaacaaaacaaaacaaaatacgtaggtgggtgggatctcctgagatcaatgccacaccctaaatctccttatcttcctcacttagtatctttccgatctttctctcagcaaggctgctttttttcccctttagattcgagaagcccctcaaataatttgtattgcatccttatattttgcatagttgagaaattatgtattttttgaactcatattttcagagactctgactcaaaaaaagaaaaaaaaaaaaaaaaaaaaaggaggggcaggggaggaggagaatagccaagatccagaaggcaaaaggagtggtttctgcttgcttattggttactctccaggttggctttgagttcacaatcctcctgcttcagcttctgagggctgggattatagtcgtggaacccagaccctggctgagaagccattctgagtgcttcttaatctgcttagagcaaaatacaggatcgaggaatttctcaggaattacttcctcgctgttgccggagctgaaagttcaaggttcaagtgccaattgacagagttctggttcacactgtcttcctgcccacagctgcccaccatcactctgtgtttagcgggcttcagcatccagagtctgctcagtgcacagagcacttgaaactggcaaaggcgctgacaacctgttggcacgcactgtctgaacctatagggttcgatgtcaatgtcctggaatcattgtgtacaagcttgatgcctagcagttgcaatgttagagtgaaatcagaattcacacacacacacacacacacacacacacacacacacacacacacacacacccagcagcatggcatcctcaatcacactcaaggtataccagctggccagggaatggcaatgtaccacacgctggatggctcaatgtatagggatgttctctttcacatttctggagaacaggctctaaaataaggtgttggttagattggtttcttcctaaagaatctactgcagactctgccccttgacttagaggttactctcttcttctgtcttcataccaccatctttctgctttttttttttttttttttttttgagagtaggtctcactctgtagaccaggttggccttgaactcagagattccccccttcctctgccccctgaacgctgagattaaaggtgtacactactatgataggcccttatccctgactctccccaccttttagtttgagacaggggcttccccctgcccccatgttgctcaagataacattcattgtgtagcccagtctagccttgaactcaagattgctcttacctcagcctccttagcgctgtggttacaggtatgcgagccaccaaacttaccctttgtataagtgaggcaagatagaattagaagacttaatagggatgtggattgggaaaagaacccctcgtcttagagtctaagaagcaagaatcccagcaccagtgacatttgctgtgaaggttgccaacaaagaaacaatatcctttcggtacagagagatttcatattaaataacaagggaccagacctaagtcctggctgtatatgaccatggttagggtcccatccttcccctaggcactttctaggcatctgccgcgtgggacatttttgttagcatcagagatatccaagcttcctgcattcctgagatctagagtcttaacttatcagccatgatcatatcaggtacactcaggatccaccctgtcaccccttcaggttccttcagcaaccttttgaagatgttagcttcaaaacccaccacaatggtgcgtgtgattattataaagatgagaaggcttgagatgtagagatgcccacacggcacactcttgactatttcttactttcctctcaaaatgcctttctttctcttactcttgtacttaaaatatagtttaattctctccccaccttgccccctgaggcagggtttctctgtgtagccttcactgtcctggaaagcattctgtagcccaggctggcctccaattcagagatctacctgcctctgcctcccgagctctgggattaaaggcatgtgttaacactgccgggctaaaatctctctaataaatcacacctctccttcccattggctcatcctggaattcctttcttcatggaaacccaaagacttagctttatgtgtggatagctttaagggataaagagaaatcttcagactgctgtgggctacaagggactccgtccctgctgctattgacgctggtcatactgggttagagtcactgcacagacctcactgaggttgtgtgctgcagtcctgggggttgggacctcaacatgtgagttcccagaggcaggaggtataatgggacagggactgacttgtcatagtcagttatgtgcaaggtttctcagggaagaatgtgatcctgatacgaaagtagaattgtgttctcccaggtcagtcagtccacgggactcttctctaaagatgaggcagctggattaacatgttagcagggtggggaagccttgcctaaccacacgtggtggtgtgggaaggaagttggcccttagcgagaaagaagatcaagtcagaattggtcatgagaggaaaagtcatgtggtgagattaatgtctatacaaaaaaagaggaagagaggtgttttttttttcttttttcttttctttttctttctttttttttttttttctttcttttgactagtaggagaagcagctctggctctgtggagccagagttctttttaaagacgactcccctcaggagaaactggatcctgagcttaaccaaaggaaaggatttggagatgagttcatttaaaacagttgctttgggcatcgtaacacctttaatgtctgcccttggcaagctgttgggaccttgtctccaaccaaaccaaaccaaaccaaaccaaaccaaaccaaaccaaaccacacaaaaaggttaggtttattaagaaaaggctgtgatacagatttaatactaatattaagctaatctcactctagttagacatagtagtagcctatgtctttaatcctagcacctgggaggcagagacaggtgaatctctgagatcaaggccagcctggtttcagagcaaattgcaagacagccagagctgcatagctgtataaagagactaggtctcaaaaacaaacaaacaaacaaacaacaacaaacaacccaccgccccccctcccccgtctccagtatacatgcaagggaaggtgtaggcttctcagagggaacatggagaactgcatcatgggattgtgtcttatggacaaattttaatggtagtaggattatccatgtttaatagatgaaaaagagccaggcagtggtggcacatgcctttaatcccagcacttgggaggcagaggcaggtggatttctgagttcgaggccagcctggtctacagagtgaggacagctagggctacacagagaaaccctgtctccagaaacccaaaacaccaaaaaaacaaaaaacaaaagaaagaaagaaagaaagaaagaaagaaagaaagaaagaaagatagaaagagagagagagagagagagagagagagagagagagagagagagagagaggagaaaaagaggactggagagatggttaagaggttaagagcactggccgatcttccagaggtcctgagttcaaatcccagcaaccacatgttggctcacaaccatctataatgagatctgatgcccctcttctggcttgcaggcatacatgcagggagaacactgtatacataataaataaaaaaatttaaaaaaaaggaaaggaaaaagagggctggagagatggctcagcagttaagagcaccgactgctcttccagaggccctgattgagttcaattcccagcaaccacatggtggctcacaatcatctgtgatgggatctgatgccctcttttggtgtggctggagatagcaacagtgtactcatatacattaagtagataaattaaaaaatactttgaaagccgggcggtggtggcccacgtctttaatcccagcacttgggaggcagaggcaggtgaatttctgagttcgaggccagcctggtctacagagtgagtttcaggacagccagggctacacagagaaaccctgttttgaaaaaaacaaaaaacaaaaaaatgaaacaaaaaaagtactttaaaaaaaagagggctggtgagatggctcagtgggtaagagcacccgactgctctcccgaaggtcaggagttcaaatcccagcaaccacatgatggctcacaaccatctgtaacaagatctgacgccctcttctggagtgtctgaagacagctacagtgtacttacatataataaataaataaatctttaaaaaaaaagaaccgaaaaagagaattctagaagtgggtttgacttttctaggagtggggtttactcccctttcctgtcttcatgtgggatttttcagctatgtcatggtagaagcaggcaagcctacaaagttagcagtcatttcggtagtcagtgccatttgactagcttgggtttattaaaatggtctgctaaaacacagctctttgaatgcatcagtcccaggcaccttgaaggtcgtgggtataccaggccctctccaggaatggatctatcagcactttgatctcagactcataagcctctagaagggggaagggaattctggcagttgagctgctccatcaagctgtagtctgtgatcacaaccccagctgctcacttgttggcactgctggccaaatacaagaccagagcatcactcattttatggaagaggaattataatggtccttgtgctgacgcagggaacctcgagttggctgggaggctgttgctcaaacattctctggatgttatatccaagtgcaagggcactgatgctgtgtccagatccacatgcatatgcatctccctccctccccctccctagatcagccacatatgcccctgctccctcacagggcaaacttcctaaacagtctcttcactgggcatggaaacagtcagatacccatgagaagtcagcctaggctgtatactgagttctaatgctggcaagtctgcatcatgattacaacaaacaaagccaagaagaaccccccccccccactccccatcacaactttagttcaggtaaatcaaaagatcttgaaagagtggacagatagggactggcaattagtcgttactggcatgtgctcgtaaacatctgggtggttgcaaagagaaggttttcttaaatcattaccaatcgtgcgctccatggccaccacagctagtgtttcaatgactattctattgctgtgaagagacaccatgaccaaggaaacaagtaagcaagcaagcaaacaaaaagcaccagggttttgcttacagtctcagagggtaggtcaatggccataaggcatggagaacggcagcaggcaggaatagggctgaaatcttacatcctcatccaaaggcagaaaaacactcaaacagacacaccagaagagggcaccagattccactacagatggttgtaagccaccatggggttgctgggaattgaactcaggacctcttgaagagcagtcagtgctcttaattgcttagccatctatctctccagcccctcttttccttattttcaaaatggtactggtttttggtctctcctgacccatgtttgtgaaatgactttactggggtattgcaaagatctgctgccctgccctccactccaggtcttacgtttcctgtagcccagactgtcctctggcttgctgtgtagctgagcatgaccttaaccttctaatccttctgcctctacctcccaaattctgggattataaatgtgcaccattgctccaggaaatgttacaaggagtgttcagcacatacatattatctagcaaatgttactatcagcaaacaattattcctacaatgcaattccatttagtttattccaggcaagcatccctgtactggctgattttgtgttgacttgacacaagctggagttttcacagagaaaggggcctcccttgaggaacctccgtgagatccagctgtaaggcattttctcaattagtgatcaagggtgggagggtccattgtgggtggtaccatgcctgggctgatagtctttggttctataagaaagcaagctgagcaagataggggaagcaagccaataagtaacatccttccatggcctctgcatcagctcctgcttcctgacttgcttgagttccagtcctgacttcctttggtgatgcacagccacgtgtaagctgaataaaccctttcctccccaatttgcttttttttccccccttgggtttattgagacagggtttctctgtgtagccctggctgtcctggaactcactttgtagaccaggctggcctcgaactcagaaatctgcctgcttctgcctccaaagtgctaggattaaaagcgtgtgccaccacgcccggcccccaatttgctttttggtcatgatgtttatgcaggaatagaaatcctgactaagacaattccttacaatgtgtttctccttattgtttgcctttttagggattggggttaaagctaggaccttgatatgcactccaccaacggagcctcaataccacttcctctttctgatctgttccccaagcaatggggttcctcctttctcttcagagcagatctggtccccagttcgttctttctttctttctttctttctttctttctttctttctttctttctttctttctttctgtcttctttccttccttccttccttccttccttccttccttccttccttccttcctttcttcctttcttctcttagccccactcactctggcctcattcatccccagtaatttcattaagacaaagcaaactttacacgctggcctgtgccgctgatctgtgaacctgatgtgtccgtgaccacaggagtgccaagtgtaggtctggagatgggacagagaggtgcactttctctaagactgagaggattgcacgtgtgtggggaggcatgaaaataggaaagccagagcagcagcttcaagtctgttgtacccatgagtggctctaagaaggtgaacatgagcccggaaatcgctggaataggtacccccggggttcagagttcagacagccgagcacacggctgaccgggtctgggattccacggaggccatgaggctggaggagtccacccgatctctgagggtcttacagcactggagctgggtgggagcttttagacagcagcatttaggagtgccacccatggggtgatcagcgccataggccaacgggttggaacagcgtggaatgaattaaccacactgaggagcgaatcccagatgagatggcttggtgctaacctgggtgtgcagagagggcttgggcgccgatgtgctgcactagctcagaggagcgggtaggggtcagtaccacagagctggtttcccggagaggcgaggcacgagcgaggccccgcctccagctcacccctagcggagcgggactccaagactcagttcacccaagtccaaaaactacgcctgcgcggagggacaagcgagctgatccgcagaccgtaacagcaactgtgacctcagcaaccaaggctagcccggcatggagggcgagtgccgggtgctctctattcagagccatgtagtccgtggctacgtgggcaaccgggtggccatgttccctctgcaggttcatgcctcgccacttctataacccagcccggccgctagtgtgcaaggcggcggcgatgacgttggttcccttggggccaccctggggttcctatcgggagctgggcgcgcttcggatagagcctggggcacacaggctgggggcgtggagtactctggagagcctacagtagggtagtgaatgtggcacacccctatctgactgtggtacacaccgtagttcttaagggtacctgctgcttcggtcggcctggccaaccctgagtgataaaatgctgagctgggaggatccgcgggggctgctgaaattcaggaggctgagttaagatcgcagactggttggagcccaagaagctgagccacactacaggtctgatcactcctgaggtggcctgtcatcgctgggatggggctagaaccgcaaccctacacctccagcaggcttgcttgtattactgaagagacagtaatacaagcaaacagtttgctgagtttggctttggaagcaacctgttagaaggaatgcagccttgtgttgtcttcccagagcctctcctgtgaggtgtgtaatgaatgaggttgtctctgatcatttctggcaggtggtgcttcctgcttgtgactggttgccttggagggaaccagggtgtcatgggcactagaatgggagccataggcaatgtcagctgactggtgcttccttgcctggctggtccagcaggaagattgggctggcctgggcagccaggtggtggcctcttgcaatgtactttttggctggtcactgagcaaggtggcaggtccccattccccttccactcatggccagccactatactgattcctgggagatgttagggtatagtagctggctaccatggacctggaaggatctggaaggaccacaagtggctggaattgcatctaaggacaatccagggctgtcctgaatcaggcttgcttgccagacaaatagagcaattgattgttattatacagcataggagatcaaagtccgtaggcaagggcaattgctgagtgtttgagcccctgtttggttgataaatagtgtttcacccacactgtctagtgaatccattcttgttctacccagaatgcacaggtcttaactactgaaccgtctttccagccccatctgtatttccttccttcttcctttcttcattcctttaatctttctcttttttttgtcttttctaaacatcagggtggggactccagggatgggggagttgggagtagtgagtttcaaggctatttaaactatctgctccctacaggccatcaatgtgaggtgctgtccccctgcactccaagccactgtgagtctgaccttgaccggctgactggctgttcctgtcccccaggctggcaaggtgcaccaatgtcctcctctccttcctcttcttctcttctccctcctctcttctttttcctcttcctcttcccctctttctcctgttctgcactttgttccatattgggtaatgccaggaagcccagaggggactcagtcctgccctgcctttgaagttgcttcattctgggaaaagacagctggatccagacattcacagcccatctgagtcagctcaggagaaaagggaagccatatggggctgaggatactgggatacctgagatttgatgatatttctgatcgggtgacttcagagtgtgtattcaacatctaaagagacaggcagaatatatttcaggagtggtatgtgccaaacacccagggatagcggctggtctttgcctttccttgcctcccccagcgggttcttgagctgctggcatccttagaccccactttacccctgtaacctcaattgcttcccttccaacttccagtccatgatgccagaaggatgtggatgagtgtgccgttgcctcaccctgcggcccccatggtacctgcaccaacctgccagggagcttcaggtgcatctgccgtgggggatacactggccctttctgtgatcaagacattgacaactgtgaccccagtaagtgcagggatctttggggtgcttccttttcctggcactgtgttgtttcctgactttcctgacaacacttattcccctcattcatgagagccttacttccatctcagcaccactatataattagggctgctgggatgactctgcagggaaaagcactgcttctaaacctgatgaacctacatcagccctacaagttgtcttctgatctctacatgcctgctatgcacacacacacacacacacaaacacacacacacacacacagaaaaatgaaataaaaagttaaaaaatgttttatttaagccaatatagaaaatattttcattttcacatataaggcttcaaaaatttaaattttgctaaatgtattttacatttgtagcttatctcatttggactggcagtgatatcaagggcctattaacctcatgtagccagtagtagctacactggtcaccacaggctgtgctgagcttatgaatcagagcaggcagtggcactacaagtattccttggtactttgaggttagttccagagcctccatggattacagactctaaggatgttaaagtcctttattgtcaaatggcttaatgtttgcaaataacctctgcatctcctcccagattatttaaatcatctctagataaccttctattttaaaatgtttacatttacttattattgtgtgcatgtgtgtgagcatgtattgccacaccacctccagtaggatctgtgtgacaagttccacagactgaggcgattgacctcaaaagggggaggcctcctggaactggttgtggaactctttgccggaggaaaaaagtactgagccatagttctcatgacaatctatctgttttgtttcctcttatttcttttcttatttacatgttcctggtagcctaggccaagatcttaagtgagaataatgggtaagaaatcatccctagagatggggccactaacatgaccttatctccggggaaaccaatgctttactttctaaatcatttacaaaagtattaagatagatgaaaactttcacaacaataaaatttcatatggctacacatgtgtaataggaggtggattttggtatatggtaaagaaagccttaattagaaagaattaaaatagtttaaatttatacattgaagatttataaaaaaaaaatcaagcactagatgttaaataataattgaccatggggctggagagttatttcagtggttaagggcactgaccgttaaagatttattaacctgctcctggaaatatgccactagcctcggatgacagcccccactgaatacatccttttagaattgttatattttgatgatttataatgatgtcacctgttctgtttgtgattcactgaatacatagtttcagagttgtaatgcttggatggtttttgtgctttactgtgccaaatgctatttgttggtatttgtgattgtttcactggatacagtttctaagagatgtaatgtttgtttttttttttaatgtgtaaaatcccatgcttgagagctgcaaaatacactcagattcaaactgcctctgcgtttgtttctgtttgtcaccgccgaatccttacccacctagcttcaaggaccctcatgccagggacccccatacccaactggggtggtccgtggcagtggatgtagcatgtgtggaggtcataggacagtatagtccttctaccttgtgggatctggggctccaactccggatgttaggcttggtggctttatccatgctgagtcgtatcatcaacccagacttcatttttaatttaaattagagagagggagggaaggtgagagagaaagaggggatgggaaggaatgcacacatgctacattagagtgtggaggccagaggatagcctgcaggagttgattttttttcatccaccatgcgggttgcagggattgagctcaggcgggcagccctgggtggccaagcacctttacctgctaaagccatctagcctgtccctctagatggcttgacataccaacatcaatatacatggcatgtatgtgtttgatatactctattgtttagaaaataacaagaaaatagtgtgcatgttctgtccttgggtaatctctgattttcactattgttcatctactgattgaacccacagattctgaacttcagaataggtagggtcagttctatggctcaaaggggctttttaaaaaaaagaatagtttttacatttatttattcatatatgtgttgcacacgtgagccatggcattcatatggtggtcagagggcatcttgtggagggaggttgatctctcaccaagagtgtcccttgtaggctgggacacaaaacacctttaatttctgcactcagaaggcagagtgcaggttcatctctgagttcaaggccagcctcatctacatattgaactccagcgtaaagcacagctgggtcaggtcaggctgatgtggcataggcagacttctttcctgctcactgcagaccggtgcctccatggtggctcctgccaggatggcgtgggctccttctcctccttttgcctcgttggctttgctggtcctcgctatgcccgagatgtggacaaatgtctgagcagccccagtggccctggtggcccctgttctgatcatgtggcctccttcacctctgcctgtccacctggttatggaggcttcctctttgagaatgacttgctgggctgaagccccaggtgggtggagcatgggctctgtccccctgtgagtcccagccacgtcagcatggaggccagtgctgtcccagcctaggctgtggaggtgggctgaccttcacctgtcactgtgtccaggtaggtgtgattggtaggggtggaacccttggggaaagaaaaggcccgtggctttagggaagcatatgtctgtctataagggaaaagtagaaggaaaagaggttctgagatgctgaattatggtttggagtgtaacttagtgaaattgtgacgtggctttgttgcctcctgggggaaggtatagcttatcttcaaagtgaggtcagtagaggaaaggggaggttgctggaattggagagaatggggtggggggtcatcattttccaagtcttgacctccactccaacctcctgtttcttctcactacatttttttttctctttctgtcccctcacttcaccattagccattctggggtctgcgttgtgagtgggtggcacgctcttgccgagagctgcagtgcccagtgagtattccactgagtggaccacgctgcacttgtcctcccaggctgtccgggccctcctgccggatttctagggcgtcaccctcaggagctattaacaccagttgcgcctctgccccttgtctgcatgggggctcgtgcctacctgtacagattgtccctttcttccgctgtgtatgcgctccgggctggggaggaccgtgttgtgagaccccttccgcagcccctgaggtccccgcccgtgagcagcatgccaggccaagcgaggagaccagaactgcgtgagtgcaacagctcaggctgtggccgggaaagcagtgactgctcgctgaacgtggacgacccctggaggcagtgtgaggcactgcagtactggcgtctcaacaacagcgggtgcgaccagacctgcagctctccagcctgtctctatgacaactttgactgctactctggtggccgcacctgcaagtgagccctccccacccccatttgcttctgtcagcctgcagttacacattccatctgtccacacttaggacttgttaatctgtctttcttaaaaatttaaaaattaagctgggtctagttgctcacacatttaatgccagcattttggaggcatagacaggcaggtctctgtagggattaaaggccagcatgatctacatagtgagttctaggccagccaaggccacacagtgatacccaaaaacaaacaaacaaaaagcaaaacagtagaccgaaacaggtgctcagtcaatagttgttatagtgatactggtcgagtatcccaaatcccaaacttgaatccctgagttatgtggggcacgggcatgatgccacagtggaaaatttcatcatttgcctcattgataagttacagtcaaaattcagactcaggttggtctgtgtagttcagtggcagagcacctccctagatggcatgaggcccttggttcaaaccccggcatggaaacaaaacaaccaccaaaggcaggcactgtataaaaatatacagttacttctgtgtatgtgtatttttgtctttaggcttgggcctcatccctgaggtgccttatataaattatgcatagtgggctggggatgtagctcaatggatggaatgcttgcttaacatccacagagccaggctttggtcccatgcaccgcctgaactgtgagaggtgctgtgtgcttgtaaccctggctctcagcaggtggaacaggaggatgataagttcaagatcaccctcagctacatagttttgttttcttttttaaaaatagggtttcacaattcccggctggaattggctatgtaagttcaggctggccctgaacacacagagacatccttgtctctgtctctggagtactgggattagaggtatatgccagcctgtctgactaacatagggagtttgaggccagtttgagatacatgagatcttaccttaaaatatctataaaaagataactcattgcatttatttgcatatataatatttaagcgtatgtgcaaatattctaaaactctaatttgaactctgaaatagttttagtcccaattatttcaaattaggaacacagaacttgtggttatgcagccagttactgcatttgcagaaagcatacccaagaacatctcccccaaccctgccaaccccataccagcactgcccagtactgctcttccctgtgtgtgcatttagatgacccgaagaatctctaactttgtgttctctgtccccagtccggcttatgagaagtactgcaccgaccactttgcagatggccattgtgaccagggttgtaacactgaggagtgtggctgggattggctggactgtgccagcgaggtccgggtccttttggcttgaggggttctggtcctcacagttcttctgccttctgaagagttgctgtgctccattgccgactttctgcagcaacttagtgctattctgcacaactcactgcgcttctgcttggacgcacgtgtccaggccatggtcttccccagctaagccctggctctgaatacagctctgaatctagctgggtctagaggtgatcgggtgagtgactgtggcccaaggctgggtacagtggttagagcacccatgatccagaccatctgtttcatgcttcttagttgagagcgctcttgcaatgcatcttccacaggcgtttcagtgtctgtcgggttgacttctttgctatgggtggggttcatcctgtgcacactacaggaagcctagctgcagcactgagattttactcttcaaatgcaggtgagagcaccttcttgcagtgacaatgaaaaatgtctcttaaatattagactgtgctgcttgggagagagtagggaggctacaggatgggtgagagggtggcattgcaaaattgcaccgtggggctagtgctactccagcaggagaggcaggctgttttcagagcagttaaaggcatgtataagctttaaaaaaataacttttaattaaaacgtatttatattgctaggcagtggtggcgagcacgtttagttcagcacttgggaggcagaggcaggtggatctctgagttccaggctagcctggtctacaaaaccaaaagcaacaacagcaacaacaaaacaaaggacttttttttttttttttttttttttttttggtttgtttatggagacagggtttctctgtatagccctggctgtcatagaactcactttgtagaccaggctggcctcgaactcagaaatttgcctgcctctgcctcccgagtgctgggattaaaagtgtgcgtcaccatgcccggcaacaaaggacttattattgtgtgtatgatgtgtgtgtgtgtgtaggtccccaagtgccatgacacttatgacactgcaagcctgtagaggttagaggacagcagtgtgaagtcagttctctcttctcattagtttttcaggcttgcatgataagcactttgcaccatgagccatttctctggcttgcttgttgttttcttcttgttgtttgttttgtttgtgttttataggcattggcctgaaattcaatctgtagcccaggttggctttgaactcatggttctcctactcagccctcccaattactaggattacaggcatgcactatcacccctgacactcactctctttcctccccactctcttctttccccttccccctcatctcatgaaagttgtagaacttgctcactagtgacctggtagggggaacctgaagtgggagaggcatttgttgagggtagaccagggcctgaagattgagccctgacaaagaaaggagggctgaactttagagatactgtggtttgtaggttctgattggatgcaggcagaagtcaagtagatggttgaggtgacacatggctcctttcttggctaaagtggcttagtgatgaggacatagggttaagcaggagcttaaccttggagcttgctattcttagggggtcttgaagtatggggaggaaccccaggagatgactgagggctgaagatgcatacaagacaactgggtattggaggccattggaaggaaagaagagagagtcaaggaagcaggagagaaggagatgaagaaggaatctaaggactctctgagacctaaggactgggggacagtaaaggatgtggctcagtagtagagaacctaccttgtatgttcaaggccccgagttcatctccaataccacaaagaaggatagaggagaaaaagcaagcttttagagaaactgtgacatggtacactgtcccagcaaagggctacaccaatagactctaccagggctaatgaagacattattgaattcacagctttgagacactgtgaccaataagatctgttgggagagacagtggaattggatgccagctgagagctgggtgggtggtagaggcatggagagtggagatggatgtggctctctgaggttgggtgtctaggatgctatagacaagtgttgagcctttgggcccctttgctctgttcccacagctctgtagtaatgctggagattgacaactggctctgtctgcaatcagctgagaatgaccacggcttccctcatgcccagagtgctgctgactacctgggagccttgtcagcagtggagtgacttgatttcccatactcacttcgggatgtgcgaggtgagctgggaagaaaagagggtagtacattagagcatgtagccctagagatggttgaatcctatagtatggttgaagccctatgagtaaagccccatcttctggctgaagctctgttgcatagctaagtcaacccttgggtaagagccacttaaaatcaaaaccttacttgtagtccaggctacagccctgcttatagttgagcattgcccatgactgaaatctgctcactcgttcctgccctgctacttggctgaagctcatctgcggcttccatcctacaggagagtcactggagcccccagagtagagtgtgccactgctgccactgctggtggcaggggctgtccttctacttatcatcttcatcctgagtgtcatggttgccaggtgcaaacgagagaacacagcactctctggttccctgagggttttgcattacacaaggacatagctgctggccacaagggtcagagggagcctgtgggacaagatgcactgggcatgaattaagaaccccatgtgctctacatccccaactgtggggtccttgtaagctctggatcatacccacctcggtcatattaactacagactccatctgggtcttcagtgttaatcttcttgacctatgaccccatgattcctggggattgccccaacccttattccttgacttgattttctatttctatccatttcctgactcatatctttccctgaccccatcctgagctaacctctcaaaattcatccttattcctgcatgactgctgacttcaagattttttgtcatttcaacctgtccctgaccaggactgtgtctttgatgattcctgaatcatctctggcttcaacccacctgtacctttgacctcacctcagaccccttttccacccaatcctgtgttaattcccttgtgatcctcaatcccaagccttcaacttgacttattcctcaacaccaatagccatactctgatcttaacccttccctatgacaccatgacacctgactcctcatcctgatgtttcaagcctggctatcccgtttgtcacgagagagtaactcctcttccatgagctttgataattcatttatcaaagttatgagaggataacttcctctgtcccctgcagtttgtctcatctatcctcatgtatccatgttccattgggtgtgctactctccactctgagttcaccttaagattctggccacctcagatgtgaggtgtggagcagatatgaagaccattgtttggatccctagaacctgtataaatgccataaaatccttaaatgctcagtgggcatggcagcctgacttggaagatggagtcctggtccctagagcaagctagtgagtctagtcatatcagtgagctcttggtttgactgagagaccctgcctcaatgactaagagagattcctctttatcaacctcagacctgtgcacccaaaacacacacctgcacacacagatggaaagagaaaacattttgactgccacctgacatgatttcctgcaactttatctctatcctcctatccatcattggaatctttgtcaacaacccaggacccctcctcaattcctgaccccttacctgcctctatgacctctgcttgaactgaaccctaaatcctcctcccatgctagatttctctagtgtactttctcacgtctctttcttcctgttttccccaaggaacatggccaagggtgagagtctgatgggggaggtggacacagacttgaataactcagaatgcccagaggtcaagagactaaaggtattacctgcttctctgactctttcctttagggttccaagttggggttccctggtcatctagagagcccagggaagtctctcttctccctattgcctcagccccagacaattaccacatctgaggctctgttgctgtgttaggaggcacagagatttaccatgggtttcctgggtgggtggggcttccccttcttcatatggttcctcctcacacagattcctgctcccaggtctgcctagggtcaccctagagcagcagctcttaacctgtgggttgtgaaccctggaggtggggtgggggtgggcactgaacaacccttccacaggggttacctaagaccattgaaaaacacaaatttttatgttacaattcataatagtagcaaaattgcagttatgaagtagcagtgaaaataattttatggctgggggggtgggtgtcaccacaacatgaggaactatattaaagggtcacaatgaagaatgagaaccattgccctagagggaacaccctagtccacagagtgattttttttttctgttctttgtccagcatccccagcctgaaagtgttcccagctggtatgggttccatctatctttaggatccacactgatttattcaggttgtgctctccagtttcagatggctcggttggtaaagaaagaaaagaaagccaggcgttttgtggtacacaggtagtcccagtgctggtgaggtggcacgagcaaactcctggctggttaactaacctagccttcttggcaagttcttagttaggagaaccctgtctcataaaggaagatggatagtgctggagagtggtggtgcacacctttaaccccagcactcgggaggcagaggcaggtgtttctctgagttcgaggccagcctggtctacagagcaagttccaggacaaccagggctacacagagaaacccagtctcaaaaaatgacacaataacaacagtaataaaaagatggacagtgtgtcagagcaatgacgtatgaggtggttctttggcttccatgcacacagacacatgcgtgcacacacacataagcttgtgcacatgtgcaacctgagggctgtgtaaggaaaaggtcttcctgcctcagcttctccagtagctgggattgcaggtttgtgtcacaacatccagcctacatatttctttttaccagggatccgaagtatccagaattggaggactacatttagttttttaaaaattccaaatattttgctctttttatttattttaaaaatactggagactagagagatggttcaacaattaaatcctggctgctcttccagaggacccgtgtttgattcccagcacccacacagtggcttacagatgtctgtaacttcagttcctatagatgtttgatgtcttcttctcatctcccagggcaccaggcatgcacataatttaaaacacatttttaaaaaaaaataacattttatatatttaatgtgtgtgtgggtatgtgtaccacagtgtttgtgtgaaggtcagggacaacttggaagaatcagttttcttctaacaccacgtgggtcccctgtgttaggtcatcaggttcagcaggtgatcacacatctcgctggcctagagctgactgaacagaccagactggcttggaattcatagagatccacctgcctctgcctcccaagtgctgctggtggtgttaagggtgtgtgccaccatgcttcctttcctttcctttcctttcctttcctttcctttcctttcctttcctttcctttcctttcctttcctttcctttcctttcctttcctttcctttctttctttctttctttctttctttctttctttcttttttttttgagaatcttaacatgtagatcagactggcttccgacttatcctgcctcggtttcatgagtactagttgacaggagtgtgccaccgtgacagctttattttgttaatttaaaattttgcattcacttattacttacttattttgtgtgtggggcatgtgagctacattgtgagtgtgggggtcagaggacaaccgtgggagttattctcttcccactgtgtggattccagagatcaaactcaggtcatttggcttggtttttataatttaattaaaaatatctttttttctttaaaaaatatttgtttgtttgttttttgagacagagtttctctgtgtagccttggctgccctggaactcactctgtagaccaggctggcctcgaactcagagatctgcttacttctgtctcttgagtcctgggattaaatgtatgccccactgccacccagctaaatatttatttttgtgtatatgtgtacacattggtgtgtgtgccatggcaatatgtggagaaccacatttaatctgcaagtacgctgtgatggtttgtatatccttggcccagggagtggcaccatctgaaggtgtgaccttgttggaataggtgtgacctggttggaatgggtgtgtcactgtgggtgtgggtataagatcctcaccctagttgcctggaagtcagtcttccactagcagcctttggatgaagacatagaactctcagctctgcctgcaccatgcctgcctggatactgccatggctcttaccttgatgataatggactgaacctctgaacctgtaagctagccccaagtaaatgatgttttttttataagacttgccttggtcatggtatctgttcacagcaataaaaccctaactaagacatacgtttacctgccgagcactcttcccaaccctgttttatttttttgagacagcagtttgtccttggtctcctacatctggagacagcttcatcagcaacacctgtgggaatgcccaccccttttcattactgcctctcccacagcaaatgggagatgagagcctgtatctgtgtccctccaggtagaggagccaggcatgggtgctgagaagcctgaggacccaacaccacttggttgctgctgatatccgtgtggcaccagccacggcgctgactccacctcagggagatgcagatgcaggtggagtggatgtcaacgtctgagggcctggtgagtgccctccccaaaggggccctcattggtcctacctgctggatcccacacgggggttctgggagtgtctgggcctcggtgcctgctgtgtgtgttgtaagtgattggaatgccatgcaaagtgaagcagaaggtaggctggctgcaactgagaaccctaaggctgtgtggaccctggactctttcttttatgagattaagatttctctctctctctttttctttctttctttccttctttctttttctttttctctttttgttttttaagacagggttctctgtgtagccctggctgtcctggaactcactctagaccaaactggcctcgaactcagagatccacctactcttgcctcttgagtgctggggttagaggtgtttgctcccccactcctagctttttcttcctgtgtagccctggctatcctggaacttactctgtagaccaggctggctccaaaaccatagagattcgtttacctcatcctcctgagtaacgggattaaaggcttattccagcactaccactgcctggctctttctctttctccttctccttcttcttcctcctcctctgcctcctcttcctcttccttctcctcttctttctcttcctcctctttgttgttattcttttatataagatttcactatgtagctctggctatcctggaactcataatgtagatcaggttgtgaagtcacagagatcctcctgcctctgcccccccccccccaagtgtggaattaaatgtgtatgttattacatccagctgggatttatttaaaaatcacatttatttgtgtgtattagtgtactcggaagtcagaagacgccttactggagttggttatctcctatctccgtcctagggatctcattcacactgtccagtttctctgcagcctggatcctagatgttcaacgcccccaccctcccaacccccccaaccctcttaacttcagccatacagcttgtcaggcaagtctcagattagtcctgacagggtgaactagaaccacacacttattcttgggccaatcaatgtggctagggcctataacatgcagataaaacagtccccatctggtctaagtagggcttactattagagaattcatgagaaggaagactagggaaaaggtggtacccttcccctctattccaattgctcggcttcctgggatcacttttgcggtccatcgtgtaatctttgtggggtggctttgcagttggggagaatttacgtctgtctgtggcgctgtgtgtcccagctgcacctagtacagtgcccctgacatttgccccaggaagacccctatgcttgtgacacactactggttcctgcagatggtttcacctcacttacgttggcctacttctgtggggaagccctggagccgataccagctgaggaggatgacacataagccagcatcatctcagatttgatctgtcaaggggcccagtttggggcacggactgaccacactggcgagacgagacggcactggcgagaacgccctgcattcagctgcctgctatgctcgagtggatgcagccaagccgctactggatgctggggcggacacctatgcccaggatcattcgggcgcacccctctgcacgccgcagtgacagctgatgcccagggtgtcttccaggtgagataggcctgtctcttcagactgcagagctggtgggtggggatcagacacacctcttgcaaggcttttgtcatttggaaatagaaataggtactgtctcacctagattttttttttcaggacagggtttctctgtgtagtcctggctgtgctggaactcactccataaaccaggctggccttgtactcagagagatccacttgcctctctgcctctggattaaaggcatgcaccactaacactggatagaatttttttttttttttttgagacagcgtttctctgtatagtcctggctgtactggaaatcactttatagaccaggctggcctcgaactcagaaatccacctgcctctgccttagaattttttaaaaagtatcattaaaattacatttatttggtgtgcatgctcgtgtgtgtgtgtgtgtgtgtgtgtgtgtgtgtgtgatatgtggacctgggtatgtacatgcctattgccccacttgctgaagctataggaggctgctggatgttctgctccatcgtgctccacccaatcttttgagacagcccatcagcgagcctggagttaagctggtggccagaaagctctcttgatcctcttgttttctcccacacagccctggggcacacatggccaagactggctttttacgtggactttgggctctgatagggtgctcttagttcagaaaaggtgtagactctctaacacatactcctttcttctccttctcctcccctcccttccctttttctaccattcccttctttttccctcccccatctccttgaccccatcccccaatttcacgttgtaacactcctcttcctcccattcctcctgggcttctttctagactccaaatagttgcttgtctttgagtctgacttatttcacttactgcgatgatctccagttctatcaatttcttgaagattgtttaatttgactcccccaacttttgagacagggtctcatgcaagctaggcttccctccaacttactgtttagtcaacaaccttgaaatctggaccctcctgcctctgcttcccaagttaggcatttgtcatcacatccagcccaatttctttctttgttttggttgagtagcactccattgtacgcagtatgggtgggcacctaggctgagtaactccattgtatgcagtgttgatgtgcacctaggctgagtagcactctattgcacacagtgctgatgggcacctaggctgactccatagtgtagtggctgtgaatagcaatgtgggtgccacattgtcatgggcatgtgccgcagaccctctgggcccctttgtctgcatggaacgggtctctagtcgcgggtgggcaaagcgtcggatgaattgacagacagatgcacacaggagaggttgtgtagtatctgaatgtattttgtcaagtcgagcatcagactttttatgtagaagacaataaggaagttgggtgacatacccgcacggtacaaagaggttactggattcttacataaaacagaggaatgtggggctggtgagatggctcagtgggtaagagcacccgactgctcttccgaaggtcataagttcaaatcccagcaaccacatggtggctcacaaccatctgtaatgagatctgactccctcttctggagtgtctgaagacagctacagtgtacttatatataataaaaataaataaatctttaaaaaaaaccagaggaatgcaaacacagaaggtctaatgggaaccactcgcttaatcttagaagcaagggtcaatggcttcatgcccttgccataggcacgcatatgtctcttattgtatgctgactcagattccttcaagtatagacctaggagcacaggagtgccatacctggacctagggtagttctacatttagttttttgaggaccctccatagcgttctctatactggctactatactagttactttatcattaatagtgcatgaagatccctttctctagtgtttgtattctttctttttcccttttttggctgttttcatgattaaagctattctgatagcatctaagtatagtttttgtctgggtcttttttttttttttttgtttgtttgtttttttttttttttgagacagagttactctgtgtagccctggctgtcctagaactcactttgtagaccaggctgctctcaaattcagagataaccaccctctgcaagtatctgcctcccacgtgctgggataaagatgtgcaccaccatcatctcatttcagtttagtttatatgtatgtactttttttttttttggtattttgtaagttttctttatggctgaaaataaatgataagggcttctgtttgtttgttttgtttttgttgttgatgatgttgttttgtctaagacatggtctcactatgtagtcctgggtggcctggaacttgctatgtagatcaggttgacttcaaactcacagagatccactctcctttgactctggagtgcttggataaaaattgtccagctaattggtttatttattgattgtgttgtttgttctttaggcatataatattttaagttctttatatattctgattgttgatcctttgttagatgaatagctggcaaaatttccccactctgtgaggaggacactatagaagcatggggcttttctatgcccctgcttgtttttgaataatgccacagacacttttatatttattaaacgctgcaggcactatggctgggcagacagtcagctattttaacccgactattctgaccttgggctactccccagccacgtggcctgttacctgccaccctaggcttgctctgccacctttatttgtatcccacctgagaccctctttttctgctgggcacagaaatgccaccttttgctctcctgcccagctattggctatttagctctttatttagccaatcaggaggtgatggagaacactgttttacaaaataccaagttagaccaaagtctggactgtaaccagatctctgggaacagaaatcagcatataaatacacagtgcacagaaacatcccccaacaggacacttcatcaccaactggggataagagctcatgctttgcccacactgaccaagcatgctagcttgcttcttagtgtgctgtaccccgagcctgtctagatggtttgttaaggaaacggactttcctgctacctgctagacagtgggataaacttgcatgtgatgatatgtgggggcagctgcctggtagtggcctccttgtcttgggtctgtcaagagcaatggtcaccacaagctgttcttgtatccaaaggcctcacacagctgtagactctctaagatgcttacaaacatttgtttgaagtaggcttggttctcaacttcaccagcattgacatctatggttgggtaattcttggtctgcatgttgaatgaaggtctgtgttgtgcactccaatgaaggtctgtgttgtgcactccagcctgagtggcagcatcccaccaggagcatcccatctctacaatgttactgagtagagtgggcttcttccctgggtgggcctttgtttcaacaacaaaaggatttagaaatggtctcagaaggaagctcaaacacaattagactagagtttaatagcaaagcaacagatcaagcaagctgtcagtctccctggaatagagagatggggaagaagatacattcatgtcttttgagctgtggctggaaagcggcaacctggtgggagctgggggagaggtgagcttctgaggacaagtgcaggctcatgtccaggctttagccaggatctgaaagaaaaagaattgagaagaaagaaaaggggcgcggtggccaatgcatttgctatgcaaggtcgaagacctgagttcggatcttcagaaacctgtgtaaatgctaagtgggtgtgatgaccacctgtaattccagagacaggggatctttacagcaagccggctaacaggattagcaatactggggagttctggattggattaagagacttacatcaatgtatatggtggaagatccagtatacacacacagacacacacacagacacacacagacacacacagacacacacagacacagacacagacacacacacacacacacacacacacacacccatgtatacacagaaaaagaggaaaaaacatattcagaaaagctggcagggtgcatagtggtggctccaatgtgctgcctgatgaaagtcctgcaagcagctgctttaagggagaggctcctaggaagggaaaatacaatatgtcattaaggggataattagtcctctcctgtccttagcatgtcttcaggtgactcagattttttggagggacaaaggcagactcctggacagataattgacagactctattgggatacctttaaaaaatagtctatttatgtttactttatgtgtaggtgttttgcctgcatgtatgtctgtgcacaccatgcatgcagtgcccacacaggccagaagagtagagggcatcagaacctctggaactggagttacagtctgttgtaaactgttatgtgggtgctgggaactgaaactgggtcttctggaagatcagccagtactttttttttttttttaaagatttatttatttattatatgtaagtacactggagttgtcttcagacactccagaagagggcaccagatcttgttacggatggttgtgagctgggttttgaactcaggaagagcgtttggtgttattacccgctgtgccatctcaccagcccatatcagtactcttaaccactgaactatctcccagctccccgaattaactcttgaaaggatacagttgtaagtagcctgttgggcttccatcaaggattggacttagatctcagattctatttaagaagcagctttgcattaagtgggcctcaacaaacgcagacactcccagctttttatatggtaatttgaattctactgaatggcaagttgatgtctctccaaagtagtcttagtcctgtaagactaaatgacctgggggtgggaggggtggggtcgggggtggtcattcatggttgatattagctaatttttttaaaggcagcaatagagaggccaaaggtatagagaggcttgatctgacttaaggtgagacttagggcatcttgtgtggatgccaaaatgcctacaggggaagatgggatgtggcctcttataaaggaggactcctgtagtccacaagggaagctgggaaatgtagtccttcagcaggaaactcatccaaattctgagaggatataaaaaatgcagggcagaatgttatagcttttttttttttttctttccccagaggagagtctttatcagaggggttagttctgggtccagtaaaggcatattctctggctatattgcctggtagagtcttgattagctgtgatggatcaggccattgtcattctgcattcctgaggagagctggaaaatattagaaggccacaagcagatgatttggttatagagtggaagtgaaagattttctgggaaggttgagggagggggaggagcaggaacctaggcagaagagacaagagtgggacaaagtgggcagaggcaggtgcagggtggctgactggtcccattgccaggaatgctaggtagaatgagctagcagaagcagcagggagctacacagcatcagaggaagggaaaagtggttgataaagggttaatgtgaagaactacatctggcctgtggtgaaagagatgtaggtcccttttctatacagcacctaaacggtcattttgcagatatgtcaggaacaaatggagctgttgtggggcgagagccgctgagagagctcgcaagggaaattctgtttgggttcagtaagtacaacatttcaagacaggataaaaatgtaggtattaggataaagaagagagaaatcgtgatgtaggggaggagccagagtgggaggaagccaaaaggaacttttgtctggtccctgtgcctttagtccccatttcaaaccagacagcatttgttggtgtggaagcagcactgatcaaggagggcagcagtcagagctagtccttttgaactgtggagtaccggatctgtcaaggagttgacctgctcctggagggtgttatgctgatctgagctggtgacacagagttcactgatgcaaagaagccttcagtccagctgtgacacagagaagttcactgaaggcttcagtccagctgtttcagtccagagtggcaagaagaggggtggcttggatcattcatgacccattatcccctcttagatgtcatccaaactgctcttaggggtctggggtgttgatctccctgtaacttctttaaggctgacagaagtgggacgaggggagcagctgtctgagtgcctcagaagagggtccacccaaggggacatgatagaacttaagagttggcaaagatccagaacataagtcccagggtaataacacacagctgactggagattgttaagagacaacattacagcaggaagactttgacaaccagttgaatacagctggacaactgaccgcaccagagttctgaggaagactatggtagctgtaagcaaatgactgtggctcagtgctgggcactagagctttctctgaagattggaaggaatatttgttggcccagttcggtttggctgctactggcctcttgcggctgatggccacttggaaactgtcttggaccaatgaagagctgtttccttttagttcatccaatgtttacaatattgggccagggatatagctcagttggtgaagtaaccctgctaggttcattctccaccacgtaaaatcaggcgtgttaatcttaggcaggcccgggatcccagtgctcaggacccatctgcagtcaggaggatcagaagttcgtcctcagctgcacagtgagtcacaggccagtccgggacacttgagtccttgtctttttttaaaaaagattatttattttatgtgtatgagtacaccatagctgtcctcaaacacaccagaagagggcattggaccccattacagatggttgtgagctaccatgtggttcctgggaattgaattcaggacctctggcagagcttttaaccgctaaaccctttctccagcttctgagaccttgtcttaacaacaacaacaacaacaacaacaacaacaacaacaacaaaattagcagttaaaatcacttgctgttcttgcagaggacctgacaggagttcttaccacctaagttgggctacccacaaccatctgtaagtctagttccagcgaatctgatgccctcttctggacgctgcagatacctgcacccatatgcacctcccctgtgcaaacatgcatatacacataattaaaaactataaaaataaataaatcttaaaaggaaaagcccacccagaacaggcaatatagaatataaagagagaaattatatagacaattgccaaaggcttgggatgggaggtgactgatcaatgatgggtaattaaagtgatgaaaatgttgtaaaaacggattaattgtaaattatgactcaaaaaatatattgtcttgtatatatacaagaaaagatattaaaaataaaaattttgagacatagtcttagttagcgttaactgttaacttgacatagcctagagtctctgagaagtgtgtctcagatcagtgtgagattgtcttgattgttaactgatacaggagggttcagcccactgtgagcggcactgttctggggcatgtgatcgtgagctacacaggaaggttagctaaggatgagccggcaagtgagctggctggcagcaccgtcctgcattgtttctgctgtgctttggctgggaagtgagctccttagttggaggtaatgttgtggaacctgacttcaggttactgccttacatcactcagtgatggattgtgatctaagagtgtaagccaaataggtcccaagtgctggggttacagctgtgtgtgccaccacaactgggtgctagggattaaacccacagctccatgcataccaggcaagcactttactgacttatctacaggaccagcacatgttctaaatattctatattttaaaaagctttactattaaaaaacatacaaataagtgaaaatatatatcaagctcagtagttaagagcactaactgctcttacagaggatctgagttcaggtcccagaatacacagagtggtttataacttcctgtggctccagatccagaaagatatgatatcccctctgccctccttgggcactacagtcacatgcacatacccacacacatacatataaataatatttttttaagggctggagagatggctcagcacttaagaacactgttcttccagaagttccgagttcaattcccaggaaccacatggtggctcacaaccacctgtaatgggatctgatgccctctattagcctgggtggccagggagccccaggatctgcctgtttctgtcttgcagagctagagttacacacccagcttttacatgggagctggggatctgaattcagacattcatccttacagaaagtcatttgcctgctgagccattgtcccagctcttttctcttctcttctcttctcttctcttctcttctcttctcttctcttctcttctcttctcttctcttttcctttcattccatgtcttttctttctttttacaattttacttgattaattgtttaggtcaaaatacaaagtaatgggccaagcccattatgggtgatgccatccctgggcatgtgatcctgggttctattagaaagcaggctgagggctggtgagatggctcagcgggtaagagcaaccgactgctcttctgaaggtcctgagttcaagtcccaccagatggtggctcacaaccatccctaaggagatatgactccctcttctggtgtgtctgaagacagctgcagtgtacttataataaataaataaataaataaataaataaataaataaatctaaaaaagaaaacaatgtttaaaaaaaaaagaaagcaggctgaacaagccatgaagagcaagccagtaagcagcaatccatggcttctgtatcagctcctgcctccaggttcctgtcctacctgagttcctgtcctgtcttctaatagtgaacagtgacatggaagtgtaaaccaaataaaccctttcctccccatgttgctttagttatggtgttttatcacagcaatagaaaccttaactaagacacagagaggggccaggcagtggtggcacacgcctttaatcccagcacttgggaggcagaggcaggcggatctctgagttcgaggccagccaggtctacagagtgaattccaggacagccagggctacacatagaaaccctgtctcaaaaaaccatcccccccaaaaaaatagacacagagaggggggaagggggaaggagaggtagaggtggttgttgcacatctgcaactagtactaaaggaggaggcaggagtacgctgggtttgaagccagcctggggtaaagagttcaaggctaacttggctactataaagacaatgtatcaaaaacaaaacaaatagaaatcaaagaacaaacaactacaacagacatgagagctggcttttaaaatgagatcactctgatgaaggtgggtggagaggtgaggggagagtggaggtctgcaccatgtctgcctgcatggtgccatgcttctcaccataacaatggaatgaacctctgaaattgtcagccagccccaaataaatgtgttccttgataagagcgagaccattttctaacctcattaatccattagtagttcagtccttgaaggaatcagagccctcatgatcctatcatttcccaagggctctgcctctgaatcctgctacacagggcaacaagcctttgccatgagagctttttcagggtatttgagataaatgagacaatttgtgggagtagccttcaacaaatcagagcatggcacttttcgcacacataccccaacctccttgctcttccctaaggttaattctgaggttgatccaccattccttaaaggagcgctctctctctctctctctctctctctctctctctctctctctctctctctgccccccaagagtctcatgtagcctaggctagactcaaattcagtatgtagccaaggctggctttgaacttctaattgaagatctctctatgaggtagaattccttgcatttgattgttggcctgaagaagcccacctttagccatgtgcatgagtaaactcctgggagtaaacactgaaaaacgcaatgacactcaagcaaggagagagcttttattcttgagggctgtgcacatgaagagagtcacacaactctggctttatgtgaatggaagtatcacatagagggagcccactcctgcacctagtacagctaacttaattgcaagcacctgtgagactctttagtttttcaggggtgagtgtgtcctgtaatggttgggggagaggtcttagtcagggactaggaagctgtgatgattggtgatgggagctaggcctctgggcatgcctgtggaggattattttgtgttaattggagtgggaagactcatccactatggttagtgacattctttggcttgactgtacaagattacatcacaacaaccgctggggaaaagagagttggtggaattcaaagattcatgtgtgcataacttcactagtaccctagcttcaggtgttttatctaagcgggccttgttcaacctcccaccccaggcagacacggtgcaggaggagctgagagttctatatcttcatctgaaggttactagcagaatactggcttccaggcagctagaatgagagtcttatagcccacacccacagtgacacacctactccaacaggccacacctccaaatagtgtcagtccctgagccaaacacatccaaaccattacagttgctatactaaatatcctgacaaaaagcaacttagggtaggaagggtttaatttagctcacaattccatgttaaagtctatcacagcagggacggctcagtagcatgagcttaggacagctgctctcatcacagtgacaagagcagaacaaagtgaatgcatgcatgctcacttattaccttgcttgtgtttagcttggtttctccattcttacacagttccgaatctcttacatagtgtcttagtcagggttttattctgtaaacagacacaatgaccagggcaactcttataagataacatttaactagggctggcttctaggtttagtccattattgtcaaggcaagagcatggcagcatccaggcaggcatggtgcagaggtgctgaaaggtctatggcttcatctgaaggctgctggtggaagactgacttctaggcagctagggtgaaggtcttaaagcccacacccatagtaacacctactctaacaaggccacatctccaaatagtgccactccctgggccaagcatattcaaaccatgacacctagggattggtgctgcccacagtgggctaaatctgcacataagtgaattaagccagtctcccatagacatgctcattgatcaacactatatagacaatccctcaatcaggttctctttccaggtgattctaaatttcagttgacaattcaagttaactgtcacagttacttcttttgcacacctttagaagaaaattatttaccttaggaacaatccaaaaaattatgacaagggttgagtatgtaatctcactagtaggttgcttgcctagcaggcaggaggacctgagctaaatcttcagtactgataccaaggaagcaacaacaaagaaatgattttggaggtggctttgagacagttaagggacatagtcaacacaaagcatgtctgtcaacttggacatttactactgtgggcaattgagatgacatcctactgggaatctctcaaacgtgttgagaaacacacatgtcagtgtcatccttctaagaacgaggggtgtgggacttatttgccaactctcattaatcacttggttagggctgaacacaaaaaggcagttgctgggcgatcgagctccatgacctgaattcaatccttgaaaccttctggtgggagaactgactcctgaaagttgtcctcttatctccaaatgtgttccttggtatgttgatcatgccaaaaatgatgatggtaatggaagtgacattattatcatcataataaaataaaataaaataaaaattataggagctgctgagatggctcatcaggtaagggaaactgctaccaaacctgacaacctgcattaaatccctgaaactttttatggtggaagaactgactcctgaaagttgtcctcatgacttcagggtcaatctgggctacagagcaagctcctgccttcaaaacacatcacaaaaggcatggtattttcatacaacccatgaattcctatttataccttaaatcagcttgaaatcacatttaagatataacttgaatgctatgtaagtagatatactatattgtttaaagaaatagtgcttaagaagtttgcatctattcaatacagatatcactgtagaagacctaactatatttcctttcccttttatttattcatattttgagtgtatacacatccatgcatttgcatgcagttgaaggctggggttgatattagatatttttctaaattgctctccaccttatatatcaaggcagggtctctcacatgagcccagaactcactgattcaggtaggcagcttgcttcaagtctcccctctcttcatctcttgaatgttggaattacaggcaggccaccatggccacctggaacatacatggtcctcagttgcatgtgcacctgtttgcacacatatacaaaacctgcatgcacacatacagacacacacaatcacacaccatacaccaatacacagaaaatataaagtcattgaaagcaaacaaaaaagagaaagttcaactgacaaccatgtcctaatgcccttaagaaacacacttttgtgttgacccagaaaaacagattcaaacacataactcaagttccaatcttttccaaaaatattattaaagaagccagacacggggttgcctttatggtttcctatccataactaaagttattggttcttatacttcatctactcttagcaaccaggcagtcctctgggccatgttctcttagcccagacaccatgatgactcttcttgtttctctgtcccatagacattctttcttctgcacattcttaccatctcactatgacttcctttctccactctctccttccttgtggtccctagtccaggaaacctaaacctggtctttgtctcttctccctagctattagctgttgacatctttatttaccaatcaggattaaatgagggcaaggtccctcaggcagactccaaatcttggagaacaacccttagcattacaataaacagtaaaagacaaaacttcctcactgattatcttaacatgtatgttttatgtgtatggttgatttgtctgcatgtatgtacaatgtgctgtgtacatgcttagtgattgcagaggctctggggtttcctggaactgaagttaacagatatgttatgagccatcatatgggtgctggggatgaatccaagtcctctacaagagaaacaagaactcctaattgtagagccatctatccagactcaggttccatcatcctgaaagctgaaagggcctgtcccagagcaagtgaaagcacgaccttcatcttcatctgctcacttggagcacatgaaatgtgtaccctatgaaggtcccagaacagcacttgcctgcaggggtttcctgtgggtgctgagttcagggacctgccagtgtcatctccgctgtgacactgagacccagggttcttcctgagaagtgtgggaaggcagagaaccaagaatgctgaggagagagggtctggtcccttctttcctctttcttctcatcaggaacccctaaggctgaagccctctccctgctgcttctagctctcaccatacaaggttctcccccctctccctccccctctctgtgtgtctgtgtgcccatgtagctctgggctgcacgatcatgtagctctacactcccacttgtttctctcttgtcaccatccgtgtaccggggttctgtgtctgcagggctcagagctggaaggggctccctcctgttcccttctgagaacaatacagaatctcctggattatgcaaacgcaacttaaaattggaattaaaaaccttctaaagaatctcatggaaggatgccacttttcagacaatctgaaactttgcctccctccattcatttttaggcctttgcctaaggtggggatggtcagtcagatggcttctgtagccagaatgtaattcaccatagctatgataggttctcacatcactgtgaatgtctctgtctgcctaagaggagaggggatgaggaccaattctcatattctggggtccctagagcttccatcccagaggctctatactcactaacaagcctctcagggccaggctggtgctatgagaaattctctttcctggtcctagggtcttttcccctcgtatctagccctaagcctcatagcaggcaaggattaattggaatgctcctttggggactattaattttgcttttattccctcagatggagggaggagatgacagctatatccaagctgtaaatacacagcttggactgagcccagagagtttcttcctctgttctgactatccccaggccaggtctccaggcttcttgtttctgtgcagtctaatcttctcactgactgattcattccatcttcgctcatcttctcactgaattgttctacctgaactcatattaactttggcaatatgttctaatcttctgcttcctcctccttctcctctggcttgttctgtcttcacagtctgtctagcttattctctctgccacctgtctttgcaaaactatcctactaaaacatacacactctcaccccgtgctgctctaaaacagcatctccttcctgagctgttcttgtgagagctgggcatatcctatctctggcccattctgtcaagtctttccctgatttgtcttgttgtctgcccctccattagatgttgctttcaaacatggctgtttccttctacaaactaaccttagcgtcattgttagggattaaaggatgtgcctgtattcaagccagatcagactgtaatccagagcatgtgtgtattccagctgatcacacaaacctagatggtctttgcatcgatgtgatcccttgccagggcagccatgtcggattaaaatgtcctccacagagggccagttacaagcacatccccagctccagcatttcttacaatgatagtatcacctcagcaggccaaggctgcttccccaagatcctatgcgtgtggagagaagtagtagataattggatgttgttactcaggatgccaaagcctaatttagggtcccacaaccctcaaatgcttgctctttttggatagttttagtcctgtaagtaacctcagggaactcactggttcatcaagctagacctggctggaactgtttctccaggttgctgttggcgccctcccccccctgccctatggggtaaatacacttgacttaagtcttttctcaaaagtcacaacagttaatgcctgaatagagactgacagaatcaaagatgagctgaggagagcagtgcttgccaagacctgtggctgccatgatctccgcgagggtggagaatccgcacaggaaaatcctggtgcggctcgctcgatccatgtgttgtgggatggtggatctctttgctgtagtggtggctgcatgttctctgtgatgtgtgactggacatacaactgagacttggttgtctgacagtggaaatgagtctctgatgactggcttactcttaccatgataggtatttgattatttctgtctgagatccctttgtaaggggagccccaagatatctgtcttcccttgagtgaaatggagtgtcatgcatccgtgatgagtgggatctgccacctgaatgtagagaaagtcttatattcctggagagaagcatgcatggaacaggagtgctggttagttgttgaggcagttgcacgtcactgcactgagtaataaaacatgaagctgagggtgggatggctgttcagagggaacttacctgtttaagggagtaaccgcaagtgggaatggcatcccccatgttagtctctaacttggatagaaaaaaagggtgagatgcaagtgttggcttgcatttcttttttaaaaaagttatattgattcctcagtctctctctctctctctctctctctctctctctctctctctctctctctctctctctctctctcatgtgtgtgtgtgcgcttgtctctgtgtgcatgcattagcatgtgcaagcacgtgcttctggtcagaggacaacttccaggagtcaattgtctcctcttaccatgtgggcttctgagactgtactcagatcttcgtgcttggtaacaagtgccttggccctctgagtcattttgccagtaagttttgtatttcctgtagctaggtagaaggtcaaagtggaaatcaaatacaagttagatatgtgctgaggagtccttccttccttgcaacctatgacaaggccacagagactgaggaggaaaagaacgtagtagaagtaatagaagataccttgaaggtccaacctttactagagaagaagaattcaccatacagacaggggctcaccatgtgaacagggactggctagatggcttagcagataaaggtgactgttgcacctatggtccccatggcagaaggacaatcgttacctgcaacttaccatacaatatgatatacttgcgcgggtgcatgtgcgtacacacacacacacacacacacacacacacacacacacacacactatacatataatatatagatttaaaaaatatatattatatatatttatttgttttgttttgttttgttttgtttttttccccttctctctctggctccacttgctttggccccaagatttatttactcattatatgtaagtatactgtaacagtctttagacacaccagaagagggtatcagatctcattacagatggttgtgagccacaatgtggttgctgggctttgaactctggaccttcagaagagcagtcagtgctctcaactgctgagccatctctccagtccctatttgtttgttttttgagacagagtttctctgtgtagtcctggctgacctgggactccctgtagaccagattggccttgagctcaacaattttttttcttttttcgagacagagtttctctgtatagccctggctgtcctggaactctgtagaccaggctggcctcgaactcagaaattcgcctgcctctgcttcccaaatgctgggattaaaggcatgtaccaccacgcctggcaacaatttttttttttttaatgaaaaagcagacatgcatagaggatgataatcttggacaaggaagggaacatggtagtgacagaagatgtccttcaggtccaacttttaatagtgaggaagggaaatccatgatccaacatgcaagacagaagaccgaacaatggctcaatattatgacatgggattagagagacggcttagtggttaagagcactggctgttcttgcagaggactgtgtgtgtgaacctgtcttgcacaggttccattaccagcacctgaatgcagattataatcatctataactccagttctaggggattcaatgttctcatctgacctctgtggacacacactcaacgtacatacatgcttgcagataaaaacattcatacacataaaataaatcttttttgtttttgatattataatatagttacatttctcccttctcttttctccctccaaatgttcccatataccctgttcttcttcacattcatggtgtcttttatcactaatggttattgcatgaatatgtctatgcacacacagacacaaatataaatataacctatttagtccatgtaatggacttatgtttaaatgggggtgggggtactgggtagccagagtctgatctggagcctggtgcagagggtggacagatgatggcagcagtggtgggtgctctatgtagtcagttgcagcaggccagaacattagtgtggttctgaggggtggggagaacttgaggagagcatggatgtggtggtttgaatgaaaatggctgccagagactcacagagagtggcattattggagatgtaggtttgttggagtaggtgtgaccttggagtaggtgtggccttgttggaggaagtatgcctgtcacagtgggtgggtgttgaggtttcagatgctcaagccaggcccagtgtcactctcttctttctgtctgcatatccagatgcagaactctcagctacctgctacctctctagcatgcctacatgcagtcatgcttcctgacatcatgacagtggacaaacctctgtactgtaagccagccccaattaagtggacatggtgtctcttcacagcaataaagccctaactaagatgtttagtgactaaaaactagctagaaagaacagacatgtggaagctctgggtctctaaattagtcctgagcaacccaagtaacaacatcaaatcatctactgttttcttccacaaaggcagagtctttgggaaacagccttgaccagctgaggtgacaccccttatagattatcaggagcactgatggagttagggatgcatttgtgactgctgtccctaaaggaggattccaattattctttccttactctgaggcttagggctgaatgctggggaaaaaagaccccagggtctctagttccaggagagagagagtacttctcaaaacatcatcagcctggccctgggaggcttgttagtgactgcagagcttctgggacaggagctcagggaccccagaatatgacagtgtgggtcctcagcccctcccttcttaggcagaaagggacattcacagggatgtaagcacctatcatagctatggtgagttacaatctggctacagaagccatctgaccatccccaccttagggagagatctacaaatgaatggagggagagaaaaattttcagattgaacagtgacttccttccatggagcttgtttcaaaggtgtttaattccaattttgggttgggtctgtagcacctaggagaatctataatgtgctcagagggaacgggagggagcccctcccacctctgaaccctgcagacacagaacctgtgtacaggtggtggcgagacagagagaggagggttagggagtgcggggctacaggctcatgcagctcagagctacaggggcacacagacacacttctcaggaaggaccctgggtctctggctgtcacagtggggatgacactggcaggtccctgaactcagcacccacaggtaactcctgcaggcaagtgctgtttcaggatctttgttgggtgcacatttcatggactctaagtaagcagatgggggtttcaggtcccatcaagtgacttcttggacttgatggtcttcctgtctaagaagtgggaacatgaatctggtcccttgtttacaacatgtctcagccaggttcttttagctatcagaatgctagtacctggagttctgtgtttgaatcaggttttcagttcatttggaagacgtgtcttaatgaaagatcttagagtgctggtagtccagccacatgcaggatttccagttctcagttttagggttgggaatttattcatagcactatttgtcaactgtgagttcataggagttgtctttgagttcacagataaggctcagaggggtgcagccagctgccaggagtcatcatgtcccttacaagtctgttctggggattcaggtccccacacttgaacagcaagcattcttccccccaccgagcatctccttagctgagtagtgtaccactattggctgtctgacttccctgcttcattttgttttccaaacactgttgggtcaggagttcttatctaggatttcttcctagatctaaataagctagcaatggccttactgtcttctttccccatctgaagatctttactttgtgtctatggccatattgccctgagtgtacctgaccttgtttgtcctcagaagccgagcaagattagacctgcttagtacttggatgggagacctaggaatactgggtgctgtaggcttcaatttgtttctttgtgatttttttaaaaaaagatttattttaatgtgtgggtgtgccacctactattggatctaagaagtaaactgtcatcctccaaaagaagaggaagtcctcttaaccacggagtcatttcttcaggccctgatttataattttttcctttgttttgtttttatttcatgtgtgtttcatgtgcatctatgtaagagtgctggatcagagacagttttgagctgccgtgtgggtcctgggaatcaaacccgggtcctctcaaagaacagccagtactcagagccatctctccagcatctcttttcttcttccttccttccttccttccttccttccttccttccttccttccttccctttttcttccctctctccctctctccctccctccctccctccctccctccctccctccctccctccctccctcccttccttcttcccctctctctgtctgtctctgtctctgtctctgtctctgtctctgtctctctgtctctctcctttctcttttcttgcccctctctccctcccttgctcttttgagacagggtttctctgtgtagccctggctatcctgaaactcaccctgtagaccaggctggcctcaaactcagagatttgtctgtttatgccgctactgggattaaaggcgtgcaccaccatcaccacctggttaattcttttatcttcttatatgttgaggagacaccttgctggttgggtaataagtgatcattcctgaatccctctgtcttgtctgcaagccagtgatgattctcctaccccacacctggtgcctagccaagcctcactgccctgctttgttccagtaaccctatctcctctcaggcgcctgagaagcagcaggacaatgggacctggctggtgacagagttcctgctggtgggattctccaacctcccagaactgaggcccactctcttcatcttgttcctcctcacctacctggtcacactcagtggcaatgccaccatcatcaccatcatccaggtggatcgcactctccacacacctatgtaccgcttcctggccgtgctctccctctctgagacctgctacacactggtcaccatccccaatatgctggctcatctgctgatggagagccaggccatctccatcgcgggctgtcgggcccagatgttcttcttcctaggcttgggttgcagccattgtttcctccttaccctgatgggctatgacaggtatgtggccatctgccatcccttgcgctactctgtgatcatgagacccaccgtctgcctgtgtttgggagccttggttttctgctctggtttctcagtggccttgattgagacctgcatgatcttctcctcacccttctgtggcgcaggccatgtggagcacttcttctgtgacattgcgcctgtgctgaagctcagctgtgatgagagctcactcaagggacttggcatcttcttcctgagcatcctcgtggtgctggtctccttcctcttcattctcctctcctacgccttcattgtggctgccattgtgaggatcccttcggcctctggccggcgcaaagccttctctacctgcgcagcccacctcacggtggtcatcgtacattttggttgtgcctccatcatctacctgaggccggactctggggctaatccctcccaggaccgcctggtggcggtgttctacaccgtggtgacaccgctgctgaaccctgtggtttacaccctgaggaacaaggaggtgagggtagcgctgaggaaaaacctggcacggggctgtggagcatttaagtaaaaacttgtgtctatttgcttctctaataattaatacaagtatattaaaaaaaaaaaaaaaaccaagaccttcatcccggaactctagttccctactgggaagagaggaagcaattctatgccagatgaagtaacttctgttatctgccagtgcctgagaatatgtaaccacagtaaagggtgacttatctttatcatggattcttggacttgatgtggtgcaatgtgatctgtaatgcctaatgtttgccagtggagggcgccactgatacaactcatggatggagaggggcagagggcagtttttttctttaacatttttgttatttttattatcattttagtttcttaatttttttcatgtaacatattttcattatagtctttcttatccgagatcctctttacctccctacccactcaacttcatgctagtgatcctcccaacagagaacagtgtttaaagaaaaactgtgggttttaaaatattatttgaggacttcatatataagaactacatttacatcactcccgttttccaccccactccagtgtccacatagaagttttaaccaggagagggagtgaggaccacaggccagagttttagctcggtgggaatgcaagggtgggtatttcccccctcccccggctgctcaagactgccttttggtcagaatcacacatttaagtgcaattaaaaaaaaaaaagtacttttagtttagctttgtttgcttgtttttcaagacagggtttttctgtatagccttggctgtgctggaactctctctgtcatgcaggctcttgaatttataaaaatctgcctgcctctgcctcctgagtgctcggattaaaggcgtgtgccacctctgcctggctcaaaaaaatttaagttagcatacaaaataatggatttaaaaaaaaattcttacaccattgcatacactagcaagattttgctgataggaccctgatatagctgtctcttgtgagactacaccggggcctagcaaacacagaagtggatgttcacagtcagctattggatggatcacagggcccccaatggaggagctagagaaagtatccaaggagctaaagggagctgcaaccctataggtggaacaacattatgaactaaccagtaccctggagctcttgactctagctgcatgtgtatcaaaagatggcctagtcggccatcactggaaagagaggcccattggacacgcaaactttatgtgccccagtacaggggaacgccagggccaaaaagtgggagtgtgtgggtaggggagtgggggggggggtatgggggacttttgggatagcattggaaatgtaaatgagaaaaatacctaattaaaaaaattaaaaatttcttcttctctcatatattatactgactccagtttccccttcctcttctcctcccagtccctccttcccacctcccctctctcccagatctgcccctcttatagtggatttcttagaggcatttcatacatatgtgttgctaaactttgttcaatattcatcctcctcccccatttccactccaaccccttagctccatcttgctggtccctttcttctccaaacagtgttcttctgcttttaagtcacatgttctccattcttatgtttaccacaccccaaacgtacatttccttgaatgtgtgcgcgcacacgcgcgcacacacacacacacacacacacacacacacacacacacacacagagcaaagataagggatcttttctcccatctcatggtcccatttctagtctcaccatagcacagatccctctgtatgaacacttgtatcaatttaaatctaggaaccactcatgaaaaaaaaatatacttgtatttctcaaaattttatttaaaactattattttaaaaatgtgtatgagtcttatgcttgcatagatgtctgtgcaccaagcgtgtgtttggcacccaacaaagccagaagagttgcactggttctcctgtttcaacagtgatagacagttgtgtgcagtccagtgggtgctgggatcccaggtccgctggaaaagcagccagtgctcttaaccactgagccatctctccagccccagagtcagtttcctgaatctggcttatttcacttaaggcaatgatctctacttccatgcatttttctgtatgtgcaatgatttcaattttccttatggctgaataaaattccattatgtacattgctagtttttttttttatccattcattttttgtgggcatttagtctggttccattttcttgctattgtgaataaagtagcaataaacaagtatctttgtgttatttgtgtgtgtgtgtgtatgtgttaagtctccaagatatatgccccatggagggtacaactgtgaaactgtatattgatttctatggtggctacactagattcagttcccactgctagtgttgagaattcttctttccctacatccttgcctatatttgtgacagtggttgtcttggagacaattgttctgaccagggtaagatggcatttcaaagcagcaaccagacctcccagagctcccagggactaaaccaccaaccaaagagggacctagggctccaactgcatatgtatcagagaatggccttgtctggcatcagtgtgaggggggcccttggttctgtggaggctcgatgctccagcataggggaatgctagggcagtgatgtgggagtgagtgggtgggagggggagcaccctcatagaagcagggggcatgggggataggatagggggtttgtagagaagaaactgggaaggggaataacttgaaatgtaaataaataaaataaccaataaaaaagaaagaagaaggctgaactctttttcaagtatatattgagtatttgattttctctttttgaaacttgtctattctgttcattagcccatttataggttatatgatttttggtgcttaattctgcaatttttcaaaaaaatttcaatgaaaaatttttttagtgtatatatggtgtgtgtgtgtatgtgtgtatgtgtgtgtgtgtatgtgtgtgtatatatgtgtgcatgtgtatgtatgtgtgtgtatgtgtgtatgtatatggtatgtttgtatgtgtgtgtatgtatgtgtgtgtgtatacacatgtgccatggtgcttgtggaggccagagagcaacttttgattctgtccttccatcctgtggattctagggatcacacttaggccacccagcttgaagcacatgcttttgtccactgagcctcctgcctgcctgaaccatgcagctctttgtatatttcagttatgaatccatcagctgatgcagagttggtaaaatattttccactatatagactgtctctttgttctggtggaggttgtctttgctgtgtagaggctttttaattttatgcaatccagctcttggaactatgtcttgtgttgttggcatccttttcagaatgtccctgcttatgcttgtatctgaaagtattttccctagtggttttaaagtttatgcttagagggtcaggttttactttgagatctttgatacagtgttaattgtgcaagataagaaatatggatctagtttcatatttttggcataaggatatccattcttcctgttgccatttattttatttttatttttaatttttgttttgagccagggtttgtagttttggctgtcctagaactttctatgactcaacttgccagtcttaagctcacagtgatcctcttgcctctgtttcctaagttctggtactaaaggtttgtgccactatgcccagcccaggaccatttaagaaagtctttttcgagggacatctgtgccaaacatcaggtgtgtttgtgtgggtttgtgtctgacccactgctctgtcccattgcttggcatctatcttgctttgtgtcaggatcatgctgtcttgtcactatggcacgacagtataatttaagatcagatattgtaatacctccaacattgtctttctgctcaggatatctgtgtctgtttttagccttttattcatgtttccatatgaactttaggattttcttttggttggtagatatatctttgcaattttgatggtaattgtattgattttgtacatggcattagtcaatacaggtcttttcatgttactaattctgctagtccatgagcatgggagagtttctagattctagtgttgctgtggaccagacacaaccggcctcagttgggccccctcaatccgcaggaaaaatcagggttccggtacaggtgggcagggagttggcaaaaaggatgacaaacagacatggacacaagggagtgttgtatctgaatgtaatttgtcacaaagcaagcagacttataagcgacttttacacaaaacagaggaatgtatacaaaaagctaaaaggagccaattgggataaaaatcaatgttgacaactgggatcaaaagcaggccacctaagatcagcttaatcacaggagccaggtgagtgctctgatgcaatgctagtttattgttaaacccaccaccaggggtcctttagtaaatacctgattatgctattcctctgggcctagtgaaaaacatgcaccaggggaattccgttctactaactctttcatgaataatacttcagttcctcctaaaaccacaacccaccttcttgctaggccattgtaaattcctgtgtatgggagtgactcggctattgttctaagtatttactatgtagactagccctgagatttctagctctattcaagtaaattgtaatgcctgatttcttccactgtctcccctacgatactagaggtaattctgaatgttactgaataggtaacattcttactgaattccaagcccagggttggctcaaggactgcctaggacattggaatactggtggaggctaatctaacttagctatatgtcaaaatcaatccttaaaggcactcataataaaacaatattgaaagaaagcacacagatccgtttaccaactaaagcaaggacattggagcattcgttattacaggatgccatggttccaggagactaagtttccatgaacttttcactttgggactgcatccaagcttttgagcctgtcactcaagtggagtgggtatggcatagtgccatcttttagtgccatttgatatctgcatactgggcactatctgtggggatcttatgggctttggccccactggagccatcaaagagttgcagttctctccaagggggagcccgagcaaggtgggctgctggtcctttccggtggctgggctgcagcttccctggagttggtggcaggccgcagcaggacacagtagccagcagtgggcagctaggagtcaaggtgtgtgtgtgtgggacaccaagcaggaagtggctgtggcagagtccacagcagcttccatagcaaagctttgggagagattgctcttccctggagtgttacagctcgacgagacaggcacgctcagatgatctttgatgaaataacttgtgcactttattccttgtggataagatcttataaaacttttgaggtgggctgggggctaaaggtggatgctttctattggcttggtctgagatgttagggatgcctcatctgcatgtggaggggctgtaggtgttgcacctacatgactgactgacacagttctctccatggaatgtcatggtcatgtgttcccggacaggaacctgctgggagtagatttaaatgcctaccattctcaatcatgagaactgcctgagctcctgaatccatttagagttgagtgttcaaaggtctcttattctgcataaagtctgtctgtgggtctctgtattttttcctctctgctgcaggagaaagcttctctgatgatggctgagcaaggcactgatctgtgagtatagcagaatgttattaggagtcattttattgctacattaaaaaagtagtatttggctttaccctaagttcctgagctatctagcctcaggttcttagtcactcaaaccatgtcaggtttgggttccatcttgtgctgaagtcaaatcgacattggttagttactcttacaagctttgtgccaccattgcatgaacatgttagcataccattgtagatcaaagagttcatggttggattggtatttatgtttctcttttggtagcattcagagtaccttcctgtactagagaatctagaacactgtggagaatgctctatataggtaccagcttgactcctccgtgttcacagagttgtcttcagctatggggccttgctgttagtttatggagagccacttatcttctcagcaacagcctaggttgtttggggattcccatggaccactatgaccaacaacttgattagatataacctaatcccagtactagaagtttcatttgtgacaagagctggccagttgagagtctgtctcccccattatttgatgactccatttaggctgcctttatatatgtgtatattttagaaagcttctactatattaggtttccatattacccagtggctcttaattttatctgtctccctccttttttaccctttaccctccccttacctgctttagcttcccatttcagttttcccatccatacatacatattctatttccctttgctaataagatctgaatccatagtccctcactctagacctaacctctgtcattctatatattgtagcttggttatcaatgacttaacaggtggtttctgcatataagtgaacacattctatttttgtctttctgggtctgggttacctcactcaggatgattttttttttctagttccacctgaaagaacctaacccactcaattttagaacaggcagtcatgtgtgaccttaactttcaatttcctgggctggagagatggctcagtggttgagcactcactgctcttccagaggtcctgagttcaattcccagcaaccacatggtggctcacaaccatctgtaatgggatctgacgccctcttcttctgtgtccgagaagagctacagtgtactcacatactttaaataaataaacaaataaaacaaaaacaagcaaacaaacaaaccaaacccaaaaaaatcagtttcagtttcccaaagaagcaggccagcctccccaggaggagccactaatgggtcattagtcaacagtagcctgacatttggtggagagggaggatgaaccaagggttgagtcggttcctaagacgccgagagagataacgagccctgaattgggacagttcttgaaatttctctaatgcctgaccaaaaatggtaaagctaatatagtaatcaatcagaaattgtactaatgcaatttccacaacctagccaatcatgttagagattacctaacactccagaaaattcccttagtcctgcataagaagaggctgtgagctcctctcctcctcctcctcctcattttgatgaatggttgatcccaaatgctgttttttttttttttttttttttttctgaagaataaacactctttgccattgcatgctatttgagtctggggtcttccttcagtgattcttgtaccctaacacatccatttgcatgcaaatttcatagtgtcattttaaagcatttattcattcttctctcatataatactttcctgaccacagtctcccctctttccactcctcccagccatcatcctgttcctcaccacctcccctctcccccagatccactgcttctctctgtcctttcagaaaagagcagggcttccagggatatcaaatgaacaagatgtaataagaccaggccacaaaccctcacatcaaggctggacaaggcaacccagtaggaggaaaggtcccaggagcaggcaaaagagtcagagacactctcttatactgtcaggagtcccacaaacacagtaagctaaacaaccacaacaggtatgcagaggacccagcacagatctgtgcagactccctgattgctgctgcagtctctgtgagctcctatgaggcctgtttagttggttctgtgggatgtgttctcctcttgtccttcgtccctctggctcctacaatccttcctcttcctgttccatagggttctttgagctccgcgtaatgtttgggtatgtgtctttgcatgtgctcccattggttgtcagtgaagcctctctgatgctgattgggctaggcaccaatctatgagtataacagaatatcattaggaatcatctcactgacttgtttgtttttgtttctttgcttttcttttgatctgtcatgtttggttctactctaggtctcagagctattcgatgttcggccccaggccatccaggcagtatcaggtctggacttcctatcacggattgggcttcaagttagagtagccattggttggtcactctcacaagttctgagccaccatttctccagcacaccttataggcaggacagattttgagaaagagagaaggtaaaaagagagaggccggccatggccacgtggagagagggggaaagggaaggggaggaggagagctacagtgagaatgagaggtaagaacttaagagaggaggggccaagcagccccttttacagtaggttgggctatcttgcagttgcagggtagctgtgggggtagcaatacctggctattgtcaggtaactgtgagggtggagtctagccagaatgccaggagcttggggacatgactgatagtcacaggattatggaggtgggggctctgtggtgtcatgctgggagcatgtctgtctgggagcatggttcactgttctactgggtctctggagtaagtcttgctcgaccagaaaacaggctgcctttcatggtcccacacacatgcacctgagttacctcactcaggatgatttttttttctagttccacccatttgcctgcaaatttcatgatgtcattccccctcctccaaaacaactgagtaatactccactgtgtatcacattttctttatccgttctgttgaaggaaatctaggttgtgttcaatttctggctattatgaatacaggagcaagtgtccttgaggtagggtgaagtgtcttatgccaaggtctagatcttgaggtagattgatttccatctttctgaggaattgccacactgatttccatagtgactgttcaatttgaatccccaccaacaatggaggaatcacttgtgttattgatcttaaaattctgacacgtgtaagatgcaatatgagagtcatttttatttgcattttgctgatggctagagatgttggatattttttaaaatttaaatttatttatttatttatatcccaaatgctgccctttccaattccctacctcacagagtccttctcccatgttcctccctttcctctatgagagaacagggatcccctgggtattcccctaccctggtgcatcaaacctctgcaggattaggcacattctctctcactgagaccagacaagacagccctgctggggaacagataccacagtcaggctttagctttagggagagcctccactctagttgttgggggacccataggaagactgaattgcatgtctgctatgttgtgctggggcccttgttccagcaggtgtatgttctttggttggtggctcagtctttgagagctcccaggggtccaggttagctggtcttcctgtgggtaattcagggctttcaattctttccacaactcttccataagagtccccaacctctgcccaatgtttggctgtggggatctgcatctgtttcagttagctgctggttagagcctctcagaggatggttatgctaggctcctgcctggaaccattacagagtatcattaacagtatcagggattagtgcttgcccattggatgggtttcaagttggactggttatttgttggccattccttttgtctttgttccatctttgtccctgaatttattctagacatgacaaattttgtgggtgtgttggtgtccttatccctccacacaggggtgctgcctggctacaggaggtagcctcttcaggttccatgtccccactgttctgttccttggctaaggtaacacattaactcctgatagtctctcccatcccaggtttctgtgacttcctagaggttcctctgccccccttccccacgcctctgctactgcagatttccattcattctcctggccctctgagcctcttttctgtctcttcctacacttgattctgcccttccattccctttacctccccctctcccacccagtttcctccctccttctgcctcctatgactatgttgcccctctaagtgtgactcaagcatctgtgcttgggccttccttcttgtttaacttctttggatctgtggaattgtatcctgggtattttgtatttatggctaatattcccttgtcagtgagtagatgccatgcatgtccttttgggtctgggttacctaaatcaggatagtattttctgattctgtctctttgcctgcaaaatttatgatgtccttgtttttaatagctaaatagctttccattgtgtaaatgaaccatagtttctgtttccactcattggctgagggacatctgggttgtttccagcttctggctataaccagtaaggctgctatgaaactaatggagcatgtgtcctcatggtatggtggagcatcttttgagtatttgcctaggaatgatatagatgagtcttctgatagaactagtttcagttttctgggaaactgtcagattgatttccagagtggttgtacaagtttgcaatcccactatcaatggaggagtgttcccctttcttcacatcctcaccagcatgtgatgttgcttgagtttttgatctcagccattctgattgtaaggtggaatctcagagtcattttgatttgcatttccctgatgactaaggatgctgagtatttcttttaagtgcttcttggccatttgtgtttcctctgttaagaattctctgtttagctctgtgtgtcattttaattgggttatttggcttcctgatgttttatgtcttgagttatttatattgaaagggcaacataaaccccatattctcgatttaaagtcccccatttgtttccatttaaggaccccatttgtctccatttaaataccagggctcaggaatagaccatgaaatctagaacgagatcataaactctcctcccaaagaactgcctggagataactacaaaaattgggaaaagtcttatctcagaatgggccatatgcgttgggcagccctatctcatcctacagttagatgttcatgacataggagtgcagaaggcagaggcaggcggatctctgagttcgaggccagcctggtctacaaagtgagttcaggacagccagggctatacagagaaatcctgtcttgaaaaaccaaaaccaaaaaaaaaaaaaaaaaaaaaaaaaaaaagagtacagagctaaacaaagaattcttacctgaggaatactgaatggctgagaagcccctgaaaaaatgttcaacatccttaatcatcagggaaatacaaataaaaacaaccctgagattccacctcacaccagtcagaatggctaagatcaaagattcaggtgacagcagatgctggcaaggatgtggagaaagaggagcactcctccattgccggtaggattgcaagcttgtataaccactctggaaatcagtctggtggttcctcagaaaattggacatagtactaccagaagatcccgcaatacctctcctgggcatattcccagaagatgttccaactggtaataaggacacatgctccactatgttcatagcagccttatttataatagccagaagctggaaagaacccagatgtccctcagcagaagaatggatacagaaaatgtggtacatttatacaatggagtactactcagctattaaaaacaatgaattgatgaaattcttgggcaaatggatgtatctagaggataccatccttagtgaggtaacccaatcacaaaagaagtcattagatatgcattcactgataagtggatattagcccagaaacttagaatacccaagatacaatgtgcaaaacacaagaaaatcaagaagagggaagaccaacgtgtggatacttcattcctccttagaatagggaacaaaatatccatgaaaggagttacagagacaaagtttggagctaagatgaaaggatggactatccagagactaccccacccggagatccatcccataatcagccaccaaacccagacactattgcatatgccagcaagatattgctgaagggaccctaatatatctttcatatgagactatgccagtgcctggcaaatacagaagtggatgctcacaatcatctataggatgaaacacggggcccccaatggagaagctagagaaagcacccaaggagctgaaggggtctgcaaccctataggtggaacaacaatatgaactaaccagtaaccacagagcctgtgtctctaggtgcatatgtagcagaagatggcctagtcggccatcattgggaagagaggccccttggtgttgcaaactttatatgtcccagtacaggggaacgccagggccaagaagtggtagtgggtgggcaggggagcagggtggggagagggtatagggaactttcgggatagcatttgaaatgtaaataaagaaaatgtctaaaaaaaaatcatttgctacaaagtaaaaaaaaaaaaaaaaaaaaaaaagaaatgcagactactgaccacctatgacaccctaatccttctagatagttctcctggttccctataagaaggcctacatgcctttatctggggttgccattttagagaatggttggcccccacatactggttatatctgcagaataaatgctctttggttttgcatactatgtgagtctggggttttccttcagcaattttcagacccttacaatatattttgtatattagccctctgctggatgtaggattagtgaagatcctttctcaatctgtaggctgtcgttttgtcctgttaacagcgtcccttgccttactgaagcttttcagtttcatgaggtctcatttatcaagtgttgatcttagagcctgagccactggtattctttcaggaaattgtctcctataccaataagttcaaggctatttcccactttctcttctatgagatttagagcatccagttttatgttgaggatcttgaccagcttggacttgagttttgtgcagggtgataaatatggttctatttgcattcttctacatacagacatccagttagaccaataccatttgttgaagatgctttcttttttccattgtttggttttggcttaattgtcaaagatcaattgtccataggtgtgagggtttatttctgggtcttcaattctgttcctttgattgacctgtctgctttgatgccagtgtcttgcagtttttattaccatagctctgtactacagcttgaggtcagatttggtgattcttccagaaattcttttattgttcaggattgttttagctattctgggtttttgtttttccatatgaagttgagaattgttctttcaaggtctataaaaaattgtgttggaattttgaaagggattgcatttggtaagatagccattttaactatgttaatactaccaatccatgagcatgagagatctttctatcttcagataactttttcaatttctttcttcagagacttgaagttcttttcatagatctttcacttgcttggttagaattgcatcaagatattttatattgtttgtggcttttgtgaaaagtatggcttccctatttatttctctgcctgtttatcatttgtataaaggaggactactgagttctttcagttaattttatatccagccactttgctgaagttatcagctgtatgggttctctggttgaattttgggatcacttacgtatattatcatatcatccatgaatagtgataacttgacttcttcctttccaatttgtatcctctcgatctcttattgctctagttagaacttagaagtatatttagtagatagggagagagtgggcagcattgtcttgtccctgattttagtgggattgcttcaagtttctttcaatttaatttgatgttggctattggcttgctgcacattgcttttatgtctaggtatgtgccttgaatctttgatctctccaagactttcaacatgaaggggtgttggattttgttgaagacattttttcatcatcttatgagatgatcatgtgactttttctttcagtttatttatatagtttatatagattacattgatggattttcatatactgaatcatccctacattcctgggatgaagtatatttgatcacagtgaatgatgtttttggtatattcctggatttggtttacaagaaatttattgaatatttttatgttgatgttcataagtgaaattagtctgaagttctcttcttttttgaatctttgtgtggtcagggtgaccatggtttcatagaatgaattaggtagtgttccttcggtttctattttgtggagcggtttgaggagtaattgtattagctcttctttgaaagtctggtagaattatgtcctaaagccatctggtgctgggattttttgtttgggagacttttaatgactgcatctattttcttagggaaatagtctcttatgggacagtttagatagtttatctgatcttgatttaactttggtaagtagtatctgtctagaaaaatatccagtttatttagattttacagttttatgaagtacaggcttttgacgtatgacctaatgattcttctttaaatttgcccagtttctgttatgtctcctttttcatttctgacttgttgatttggacactgtctctgtgccttttatttagtctggctaagggtttctctatgtgttgattttctcaaagaatcaactcttggttttgttgcttctttgtatcatttttttgtttctagtagattgatttcagtctagagtttgactatttattgccatctactccttttgggtgtgtttgcttggtgtgtgggaagtggagggtaggggtgagggggtgagggtaggggggaatctcggtccagcccatgtatgctctttggttggtggtttagtctctgagagccctcaagggtccaggttagttgactctgttggtcttcctgaggagttcctatccacttttggagcccccagtctttcccccaactcttccatgagagttccaaagctccatccaatgtttggctgtgagtctctgcatctgtttgagtcagctactgagtggagcctctcagaggacagttatcctagacccctgtctacaagcataacagagtatcattagtagtgtcaaagattgatgcttgcccgtgagatgggtctctaatcaggctggttattgcttggccactcattccctcagtctctatcacccatccatgcatttcttgtaggtaggataaatttggggttgaaagttttgtgagtgggttagtgtccctatcgcttcactggggttcttgcctagctacaggaggttgcctcttcagattccatatctccagtactgtgagtctcagctagggtcaccaccactgattcttggaatccttccttatcccaggtctctagcaggccctcaagatgcccctaacctgccccccgacatttgcagatttccattcattctcatgtccatctgtctatcttccctgtctctccccataccggatcctgatccttctcttatttcccttcccatcctttctcctacaaactccctcctccatctgtcttttgtgactattttattcccttcttccgagtgaaccaatttctcatcttatactgataaattgattttcattttgcatacatgaccacatgtaagcaaaacaaagtataaagttctcagattgcatactttcagatactttgaagtgtccaatttcagacaagaaacgaggaagcaagaagtgaaatacctcagttatatagaaggaattatatggtttaatatgactcacaaaggtgcacattattcttagatgtgtcttatatgagcttagccatctatagactggaattcttggtctagaatcacagcaaaatgatcaaaaatgagtttgttaaaacaagagtcataagccgggcatggtggcgcatgcctttaatcccagcacttgggaggcagaggcaggcggatttctgagttcgaggccagcctggtctacaaagtgagttccgggacagccagggctacacagagaaaccctgtctagaaaaaacaaacaaacaaacaaacaaacaaacaccccaagagtcatattttctcataaatcttgaccacggagttacataaaataagattcttgatggattgagaatatttcatctcttggaagctaccgagacaattttagagatcattatattgtggctatagtacttcatttgttgtctcaactatgtcatcttatagagtcttaaacacattaggacctgacataaggatcttatcataaccctgaatacatctccaaacaatctatgtacaaatatgcatcagggcttggaatgttaataactctttagggagatataactcaagggatatcaataattgtgcttgagatcaagtagatgagctgagagattgtagttaataaattacttgttttcaaaaggatgctccctctccctcagtccatcaaggggtggcttatggactcatctatgacattctatttgtttaaataacaaacagaaacgatatttaagcaccatgttatgaaaaggtataaaataacagtgaagagccatcatttatttgcctgtaaaagtcattagactgcaaattcttctctttatattacatatagtccagatagtcaccaccaatatatacctagttgataccttcttagaacaaatgtacttttttttttttttaaaacaaggaaactgctttggggtggtatcaagagtacaggaaatttgaagagaaattgctgttatcttgctaccccacgtctacaccaccttcaatttccacacattgctttatttgggtatgaagcaaaatttatgaactgatattgaatcatcactatgaagagaaagccattatttacaaaatgattgacattctatgtgtataattttcattgtgggcacctttattctaacatgcttcaagactacaaagccacataaaatagcgtcattggcacatctccttcctgtgcttttggaactgcttagggtttggggatggaaattgaaagctgttgttaagctagtagttttctaaagatcatcatgctatcagagaaggttaagtagtggatgaattcaattatctacatgttgggaggctgcatttctatatatcagtggtacaactagccatggataaaacaatattacagaaagttgatgttcagatgcaaacagcagacatcattggtgcatttaaattcagctattgatctgcaattgatgaattcagcaggatcattaatttcgcgctctctctctctctctctctctctctctctctctctctctctttttggtttttcaagatagggtttttctgtgtagccctggctgtcctggaactcactctgtagaccaggctggcctcaaactcagaaatccacctgcctctgcctcccaagtgctgggattaaaggcgtgtgctaccacgcctggctattaatttctcaagaactgtttagactcaaaacctgtttagagtcaggcatgggcatgataagggatacagacatgaatgcacaacagaaagcatatggtgtgagttctgcagctctggccaagttaataataatgataataataataataacaataatactactactaataatactaataggacaatcttctattttagacatgagggtgccacactcttatgatggtcatgtctggcctgtgcctcacctgtcctttccctttcctctagcctggtatctttatatgtgatatgtttgcctcatcctaaatggtttttatatgcatagtttgatgttaacttgtgtgtaagtctccttcagaggagattatccttgggttctgctcagtgtgggctcagatgaaatcacaatgtctgtggctgaggaaggtcttcagactcatattcagcttgttttcacctgcatgtggggcctcagatgtaggagtaagtgctccagggttctccatgggctcgaagaggccagtcagaaagaaactgaagtgattcaagtggcaatctctgccatcactataactgcaaacacagcattacacacatgagctgtgtgtgctcctgttgcacactgtgggtgcaccgccatgggactcacagcctggcagacactcagttaatatgctcttctcttggattttatctgcttttatatgggagttcttgtagactccctttactgtgtttagctacagaaaatttggatgtctcttcagaatatattcttcacagctggatggagatgtgattgctgtctgttttctactcacatgtacaaccctcaaaacaaagttactggagaaggtggattttgtagtggattttgtagtggagtaagttcttttcctcatttttttttttctttttcaaattcaggatgtctatgctcccggggaagtgtagatgcaagcatccccactccctatttagcacagtatagcattctctcacttccatcttcctgggatactgacattctagtgacctatttcttttaaagctgaagaggcaatttgggttttattcaatttacttttatatttacttttatattatattttatacttgaaatttccccatcttactttgttctgcctttggactttaacactttcatgtcatctctgcatgagaaggaagggttgacaaagtattttgacaaattctagaagtacagttgtacttctgtgagaagagataatgccattcaaggaagtgaccactgtgagaatggagagacaagaggtgcctgtgttagttgctatagatttcagagcaagcacattggagtccacacctgacactccttgaagggtcaggcatcaaaggccagagttgatgcaatgatttctaatgataatctgctatattcatagactggagtctagcccaattgccatcagaggggcttcatccagcaactgatggaaacaaacacagagacaaaaccttaatcagagcttggggaatgctgtggaagaaggggagtaaggattgtaggagtcaaggacaccacaagaaaacccacagaatcaactaaccacagcttatagaggctcacagagactgagttgacaaagaccatgcatgtgtctgacataggacctctacatatatgttatgattgtgttcttttgggactttcaacagggggagaggaggtgggtggtaggtgggatgagtggtgggtggtgagtactgctgtgtttctctactcttcccctactggcaatgacctgatgcatctgacttgtcgggaacatcagtgtgttaaactgttcctggtttattcgccccacgtacttaatgaacagcttatatgtcatgttttgaaacatgagtagagaaacactgtatcaacattaattcagggagcgtgtaaaagcaagtgtagctgaaatcaggtctgtgaaaaggagcatctagacattatgttgcttagaaagagaaagcaaagaagagtcaccatcaggaacatttataggactaatgatcccttgtttacttagtcctgtaatattttgcataattcaattattaccttcaaaccctcatatgtttataaaattcacctttatactagcattttctaagtattttattatttgaaatacattgaggctgataacatacagcaccatctagttaacttggacagatgttatttctgtatgttgggtgcgtgcaagttcctgttcatttgcacaaagcacaaacaaatcacagatcaaaactaaatcctaaatggctacaggttgagaatccacagacccagagggactaagtcaaggagggtgctaggggagggttggtggaactccctgggaagggtaaatagaacacattttgtgggtagggaaagaggggtggagggagagactatggggagagacagaactgggggacgtaggggagtgatgtgctaacctagtgcagcagaaaccccctggactctaggaggatgacctagcaatggagagtagcctgaaccagccagcatctgcaaccaggcaaggcttccagtggtggggctgggacagcaacccagcaacaaagcctgtgacccacaaactgtctgtcctgcctacaagatttgctgtggcaatgatagctcagaacttggagtggacaaccaatgacttgtttaacttgagacccaggccacaagagggagctcatgtcagatactgcctggatggccaggaacaggaggaggctgaacaacccagagccctaggatagaaccaaagattactacacacacgcacacgcacacacacacacacatacacacacacagacagacacacaccaatgaaatgatttctaatgacattcttctatactcatagattggtgcctagtcatcagaaagactttctccggcagctgatgggagcagatgcagagacccacagccaaacattagatggaatttgaggaagcccgaggaagaggaggaggaaggattgcaggaggagaggggttgatgacaccatgagaacacagcctatagaatgaactaagcagggctcacagggactggaacacaatcacagagtgtgcaggagtcttctctaggtcctctattggttgtgtagcttggtgtttttgcaggtctcctaacagcaggagtggggagtctctgaccattttgcctgctcttgggaccctttttctcctactgggttgccttgtccagcctccatatgagggtttgtgcctggtcttactacatcttgttatgccacgtttggttgatatccctgggaggcctgctattttcttaaggaaaaaggagaagcggtggatatggggtagaagggagattgggtggggggcaactgggaggagtggagagaggggaaactgcagttgggatgtactgtataagaggagaataaaaaaacgtttacaacaatatgtaagcaaaaacaaaacaaaaacatgacacataaatgttgggtactttaaaatagaatgcattccttgtcaaaccttgtagagtaaaacaaacttatcatcagatgggaatgtcttatcttctggaaagtgatttatttgtttatttatttttctaacaagctccaacaattttatttcttcttccacaacatgcttctaataccattacatgattaaatgttttacatattaaagtgaaaaaacaaattattcccaagaacccatatatgttctgtttaagtgacttcttatagattaacaaagtataagcaagcaaggtattttttcttagccagtaaatcacaatttgtgattacaaagaaaggatcaattattctcttgtttatcttaaaaagtaatcttacgaaaaaaattttaaaagaatcacaaacctacaccctttatattaaaaaatagtcatttctaccttaaatcttcagggtgcacatctactcaccgattttttattaaatcatctcaggaagccaaggcaaaaatgagtgcaagaaattaatcatcaccttggtcaccagaaagacacacacatcagctagtcctagttagggtgccattgttcttgttctctgacctcaaaacatccctagctcaattatcagaagtgcaactttctgaactttaaattgttcccccagattttctatgtcaaagccactaaaaacatcttggcctgggcgcacgcattggctcggcgacgctcctcaggcagctcactgcatggtcgtctggtgtcccctgccgccacctgcgccgcctctggaccggctgtatgattaggccacaatcttcaatgagtagacatattccttagttctgtggtgttctcggtcacacatttatggagtttctgaagggcaatggagattactgccaggcacagcacgacctctatgcagacaagtgaactgtagaaattcattactactccaccaagaagcccccataagagtggataacctggacacaggcatgttgaattgaaatctgcagagcatttgacaagagctcagacctggatggggtaagcctcagtgcacttcccttgtattgccaaagtagtactggagtgaagaatcactgcttcttgttaggaggttcatttcattgcacgtttctcccaattcatattcaaaacactgagaatttcaagtggagtatattgaatattgaagtagacttcaggttgttttttttgttttaaatcatttctgtattcaatttttaaaattctttcataaccctactgggtgtttttttttttttttaaactaaattaacatggctcgaatgaactgccctgctcctgtggaagtcacatacaagaacatgcgatttcttattacacacaatccaaccaatgtgaccttaaacaaatttatagaggaacttaagaagtatggagttaccacaatggtaagagtatgtgaagcagcttatgacaccactcttgtggagaaagattcatgttcttgactggccttttgatgatgctgcaccaccatccaaccagattgtcgatgactatttaagtcttgtgaagattaagtttcgtgaagaacctggttgctgtattgctgtccattgtgtcacaggccgtggcagagctccggtgcttgttgccctagcattaattgaaggtggaatgaaatatgaggatgcagtacaattcataagacaaaagcggcgcggagcttttaacagcaagcaacttttgtatctggagatgtaccgtctgaaaatgtggctccacttcgaggattcatagaaacagctgttgtattcaagaaaactggggtgcctgatgccattgcttttgaagtggaacttcagatgggacctgatttgtcgtacgtaattgcccaatgtgtcggcttactgaataagtctactgcagctccacaggaatcttgaaaaccagttttaccacaggtttgacagaattgcaacctctatatttgggctatgatcaacatgtttggacacttagcaaaagatttttgttggttagcatttaaaatgtgcttattgtttctaccaattgacctttcctaaaataaggtattgagttatgtcattaaatgtactcctgtgccagaatattattagtctataaggaatttagaaggattaggtgccaaaatacccggcacaatacttgtatatttttagcatcatacagaaccaaaattgtaggaactaagaactctctagaccatactctagaccatccatgatgtattccttcagtcattccaaacactgcagggcttttctctttatctgcctgctcactttgtttacatcacccacatgtacgccagaatacatcaggtttgcttagccatcctttttttttttcctaagtcttgtgctggttatttaatatctctgtctcattttgttctgttttgggaaacctctgtttgaaaaccaactttgttacagaagcacataccttcaacaatgtctctatagttaattaaatgtttacactcagaagtgcaacctaacagggagggcctgaaaaagaaaggagaggaggctactaaatatttttagtaatatgttgcctttgtcttgtgcagaacatgtagagtatgctctttaatttagtaaatatttttaagatgtagagagagatacattgttgtagctaaccaattcttaatcaaaatttctgaaacttttgtattttccatacctaccagaagtattccagcttgtttgaatgatggttttcctcttctcttcccaatctcttgcaaaaaagacaaagtgggatctgctagtgtactgagcagaaatgtttgacacaccttttgagctatgtaacttaataattggatacttgatcatttgctttattatgtaatcgataaaatggtgatgtgtattaaagttagttcaaccatatatttatactgtctgggaatgtgtggttatagttctgtggaagaaatagtttgccagtgttcaccagcttgtaaaaacttagtgcaaccattgcatacactagcaagattttgctgaaaggaccttgatatagctgtttcttgtgagactgcctggcaaacacataagtggatgctcacagtcagctattggatggatcacagggcccccaatggaggagctagagaaaatacccaaggagctgaagggatctgcaaccctatgggtggaacaacgttatgaactaaccagtaccccggagctcttgactctagctgcatgtgtatcaaaagatggcctagtcggccatcactggaaagagaggcccattggacttgcaaactttagatgccccagtacaggggaacgccagggccaaaagtgggagtgggtggggaggggagtgggggggggagggtatgggggacttttggatagcattggaaatgtaaatgaggaaaatacctaattaaaaaaaaaacttagtgcgagagcttcaacatctaaataaatgatgaaacacattcgtcactgaggttactttgcctaaaattaacttaatttgtagaaaacaatggattcagttgctatcatttcaatttatggaaaaaaattgttagggttaccatgtgctttttattaaaaattgctctttaaaggtccaaataattgtgaatcaattgaatgttggcatcgagggggagcagtttgtagtagatgatggatgaccttgattttaggtcagttccatcagtcacttgtagctctgtgcagtttccagtccagttttctcatttttaagttcattacatgcctgtatatattttgaaattaatttgaacctgagtatttggcacatgatggcttaataaattttaactttgaataatcaaaaaaaacccaaaccatcttaacctaactttactaactacatctataaattctttctaagggtggtggttgaatcatcagtctattccagcaacactgtttggaaaagatcaatcactaatattctaagtgccaatgatactgcccagtgaagggctgaaaacccacttagagttttcatgccactgatagattatgaggtgtgtggtagctgtgagtgcagtaagtaggtagatactcgccagcattaggtccttaggacacatagtccgtgggactctacctctctgattcactcctatcatggttgttgctagccagtggactgcatttcacgagttctaaagctgttttgcagttcttgcatggcctcccaacataagatgaaataagcccttttcttccctaagttgcttttggccatagtatttatcgcagtaatagaaaatcaaactagaataagaacaagtgtaacttaacagcaaaattgagtataatgtatgggatttcccacatataggttgccctttacacacatgcccatgcgtttttctgccatgtatgtgccatgtaatttctactgcaattaagatacaaataggaacctaatgaagtaaatttcatgagtgttacccatgtggtggtgggactttttcgtaatgcagctgcctgagggtcagccatgctcctgtagtatatacaataaacccattggagcttaaaagaaaaaaaaaactggtaggaagagtacagaaagatctcaggtaggcactgagaggctcagtgatagaacactatgggctcagtccctagcacttgaacatgctcaatataattttctaggtcctttttaccccaaacaagttgagaatcaattttaaccaccatagttcagtatggtgactcaaatctatagacctagcacccagaaggctgaggcaggaggatcactgtgaattcaggccaacccgggtgtgctggatagttttatgtcaatttggcagaagttaaagtcatttgtgaggagagaacagtacagaggaatgccagggccaagaagtgggagagggtgggtagggaagcagggcgggggagagtatagggaactttcacgatagcatttgaaatgtatataaagaaaatatcttaaaaaaaaaaaagaaaagaaaatggcatgggataggaactccacagtaagaccaacagtgtcagctaacctggacctctgggagctctcagagactgagccgccagctcaagagcatacacgggcaggactggtctcagtggaagaggatgcatctaatcctgcagagacttgataagccagagcggggcaatacccagaggtgaagggaaaggggatgggaggagtgactctgtgaggggaaaactggggagggggggggcagcaattggggtgtaaacaaacaaattttaaaaaagaaaaaagaaaatgcctccataagatagggttgtaggaaggactgtaagacattttctgaattagtttaatgaaagcccagcccccttttagagttgccattcctgggctggtggtcctgggttctgtaagaaagcaggctgaacaagccatggggaacaagccagtaagcagcacccctccatggcctcggcatcagctcctgcctccaggttcctgccctgtgtgagttcctgacctgacttcctttggtgatgaaatgtgatgtgcaagtgtaagacaaataaaccctttcctccctaagtaggtttcctttttgtttgttttgttgttttttggatttaagttttattgcattatgatgagaaaagatacataatttaaatttatctgaatttgttaacatttaaaaacaaattttgagtaaatagacttacatcacattcttttttcccttttgtatcccaactcctccctgagacccccctcttcaaaacctgcaatacctttcatttttatcatattcttttttttttaaaaagatttatttattgttatatgtaaagttcactgtagctgtcttcagacacaccagaagagggcatcagatcccattacaggtggttgtgagccaccatgtggttgctgggatttttgaactcaggaccttaggaagaacagtcagtgctctcaaccactgagccatttctccagccctatcatattctttaaaatttataaaatattgtaacaataaaaatgacataaaagttgtttgatataaaacaacaatcaattgaacagtcttatgtagatgcttgtctacagcaatactgaaaatacatatgtttttctcaatataaattttaaataacttcaaatatattaactgtatgacattttaaaatagtatatcactattagttttttaaatgaacataaataaagtctttttgtttgtttgtttgttttgttttttagtagagcttaatatcttggctcttactgtggtacaaatgaaaaataagaacaatttttggacattggagttcattttaataaggctgtacttgaatgtccctcacatgaccaaaggattttacctacatagtagctaagctaagagttgacagttctgctgcgccaaggaatgagttgcaggcatgatttttggaaacagatttcctgctattgtcaaagttatttgacttgagtgattgtagtcattctcagcccgcagggagcaggttacattcatttaagaaatggtgtgtgtgtgtattaagatggtctatccaatgaagtcattcatcagctgtttcaatgaagaatggttctgcttggaagatggcacagacattagttaagggtaagattctggctcattggctgtgatgaatttgaaaagcattcatctcagaataagagtaacttatgaagtcctcttcttcaaattgatacaataattataaatatcaagcaaagccttcagccttactctttgctgttctcttataagccacctcccaaattaattgtctacatttcttttgactgtataaataattttgagggttggcgagatggctcagtggttaagagcgccgactgctcttccaaaggtcctgagttcaaatcccagcaaccacatggtggctcacaaccatccgtaacgaaatctaatgccctcttctggagtatctgaggacagctacagtgtacttacatataataaataaataaatcttaaaaataaataattttgaaatatgtaagctgttctgaaaaccatagtatagtgtaaaaacatcaaataaacgatcctactagtagagaggctgagataggagaagcacgatttcaagaccactacgtggcacacagcaagaccctgtcatatacaaacaagcagagagtgtatatggattgtacaatattgcgcccatttctctcattaccaaactagagagaccataggatgacaactgacaaatttcttcctcatatttttgaatttcaatctattacaatatgttgataatattagttttcatattaagagatattaaggaaaagtgattattacttcctgttaattttcttgttagaggtgggatgatgtttatgtgggtttgttgaaagattactttcttgcttcttctagggtatagttttcctccttgtggtgttttccatctataatcctttgtaggactggatttgtggaaagatattgtataaatttggttttgtcatggaatatcttgttttctccatctatggtgattgaaagttttgctggatatagtagcctgggctggcatttgtgttctcttagggtctgtatgacatcttcccagtatcttctagctttcatagtctctggtgagaagtctggtgtaattctgataggtctgcctttatatgttacttgaccttttcccctgactgtttttaatattctttgttttgtgcatttggtgttttgattattatgtgaaaggaggaatatcttttctggtccagtctatttggagttctgtaggcttcttgtatgttcatgggcatctctttctttacattagggaagttttcttctataattttgttgaagatatttactggccctttaagttgggaatcttcactttctttttctcattgtgtcctggatttcctggatgttttgggttaggagcttttgctttttgtgatttctttgactgttgtgtcaatgttttctatggcatcttctgcacttgagattctcttttctttctttttttttttgaacttcatattttcctcgtttacattttcaatgctattccaaaggtcccccatacccacccccccaatcccctacccacccactccccctttttggccctggcgttcccctgtactggggcatctaagttggcaagtccaatgggcctctctttgcagtgatggccgactaggccatcttttgatgcatatgcagctagagacaagagctccggggtactggttagttcatattgttgttctacctatagggttgcagttccctttagctccttgggtaatatctctagctcctgcattgggggccgtgtgacccatccaatagctgactgtgatcatccacttctgtatttgctaggccccggcatagtctcacaagagagagctatatctgggtcctttcagcaaaatcttgctagtgtgtgcaatagtgtcagcgtttggaagctgattatgggatggatccctgcatatggcaatcactagatggtccatctttttgtcacagctccaaattttgtctatgtaactccttccatgggtgttttgctcccatttctaggaaggggtaaagtgtccacactttggtcttccttcttattgaatttcatgcgtttagcaagttgtatcttatatcttgggtatcctaagtttctgggctaatatccacttatcagtgagtacatatagtgcgagttcctttgtgattgggttacctcactcaggatgatgccctccaggttcatccatttgcctaggaatttcataaattcattttttaatagctgagtagtattccattgtgtaaatgtaccacattttctgtatccattcctctgttgaggggcatctgggttctttccagcttctggctattataaacaaggctgctatgaacatagtggagcatgtgtccttcttaccagttggaacatcttctggatatatgcccaggagaggtattgctggatcgtccggtagtactatgtccaattttctaaggaaccaccagactgatttccagagtggttgtacaagcttgcaattccaccaacaatggaggagtgttcccctttctccacatccttgccagcatctgctgtcacctgagtttttgatcttagccattctgactggagtgaagtggaatctcagggttgttttgatttgcatttccctgatgattaaggatgttgaacattttttcaggtgcttctcagccattcggtattcctcaggtgagaattctttgttcagctctgagccccattttaagaaagaaattaaagaagatctcagaagatggaaagatctcccatgctcatggattggcaggatcaacattgtaaaaatggctatcttgccaaaagcaatctacagattcaatgcaatccccatcaaaattccaactcaattcttcaacgaattagaaagggcaatcggcagattcatctggaataacaaaaaacctaggatagcaaaacctcttctcaaggataaaagaacctctggtggaatcaccatgcccgacctaaagatgtacttactacagagcaattgtgataaaaactgcatggtactggtatagcgacagacaagtagaccaatggaacagaattgaagacccagagatgaacccacacacctatggtcacttgatctttgacaagggagctaaaaccatccagtggaaaaaagacagcattttctttttttttttttcagtttttttttattaggtattttcctcatttacattttcaatgctatcccaaaggtcccccatacccaaccccccaatcccctacccacccactccccctttttggccctggcgttcccctgtactggggcatataaagtttgcaagtccaatgggcctctctttgcagtgatggccgactaggtcatcttttgatacatagcaaacacagaagtggatgatcacagtcagctattggatgggtcacagggcccctaatggaggagctagagaaattacccaaggagctaacgggaactgcaaccctataggtggaacaacaatatgaactaaccattacctgggagctcttgtctttagctgcatatgtatcaaaagacagcattttcaacaaatggtgctggcacaactggcggttatcatgtagaagaatgcgaattgatccatttctatctccttgtactaaggtcaaatctaagtggattaaggaactccacataaaaccagagacactgaaacttatagaggagaaagtagggaaaagcctccaagatatgggtacaggggaaaaattcctgaatagaacagcaatggcttgtgctgtaagatcgagaatcgataaaaggtacctcataaaattgcaaagcttctgcaaagcaaaagacaccatcaataagacaaagagattctcttttccatctcttgtattctgttagtgatgcttgcttctatgactcctgatctctttcctaggttttctatctccagggttgtctccctttgtgatatctttattgtttctacttccattttttagatcctggatggttttgttccttttcttcatctgtttgtgttttcctgtaactctttaagggacttttgtgtgccctttttaagggcttcttgatgtttgtgttctccagtatttctttaagggagttatttatgtccttcttaatgtcctctatcatcatcatgagaagtgattttagatctgaatcttgcttttcgagtgtgttggggtatccagggcttgctgtggtggaggaattgggttctgatgatgccaagcaaccttgatttctgttgcttatgttcttacacttgcctcccaccatctggttatctctcgtgctacctgctatggctatgtctgactggagcctgtccttcctgtgatcctggttgtgttagaactcctcagagtccagctctctctgttatcctgtgattctgtgatcctgaggtctttcctgggtgtgtccaagctcctgggagtcaagctgtctttgggaccctgagatcctggtatgaccaagctcctgggatcctgggatcctctgatcctaggtatgttagagcacctgggagtggagctgcctctgggtgttgtgaggctggctgcggagtttgcacccaaggtctgctcagggcactggcccagatagtccagaaggaacctgtgccactggtctggtggagttcctgtgtgtctgggtcccgcaggtcccagctattcctggtgttggtacaaatgttgtgtcctcctcacctctgatcctctgatcctgggcatgttggagtgcctgggagtggagctgcctctgggtgttctggggctggttgcatagtttgcacccaagttctgctcagggcccagcccagaaagaccagaaggaacctgtgccactggtctggctgagttcctgtgtgcctgggtcccgcaggtcccagatactcccagtgttgggaacagatgttgtgtcctcctcacctctgatcctctctgaaaagtgatttatataacttgtatatcatatgccttcaatgactaagatatctttttatctgtgtagcagtcatcatacactggcatagagtaagtaaaagaagtggcaggtgagtgagacatgaaaggacagtgcgagagtgtaactttaggaagtgttatgtgcagggaaaagttaagagaaaatgtgcaggggaagttaagagaaaaggaagggggctggagagttggctcagtggttaagagcactggctgcttttccagaggtcctgagatcaattcccagcaaccacacggtggctcacaaccatctgtaatgggtctgatgctcttttctgtcatgtaggcatacatgccaatagagtactcaaatgcaaccacaaacaaatatttttaaaagaaaaggatgaaaaataggtactattcccttcattgacatgaatgctcagtcttaaaatagacaatcatcattatgttcaataagcgcttacctagtgcctttcattgtgtcctaggatacctgggagtcctgggcctagggagctacactatggcttttatgtttaggaatctgcctgacacatttaatgaatccaagaccctggctttcagcatacttgtgttttgcagtgtctgggtcaccttcctccctgtctaccacagcaccaaggggaagatcatgatggctatggaagtcttctctatcttggcttccagcacaagcattctaagcctaatctgccctcaagtgctacattattttgctcaggtcaggtaggaacacacttcatcacatcggaagtaaaacatattctagaaggaaaaaaaaaccatcataaaacttggctcacacagatcttaaactaaggataagacataaagatggatctgcatcatttggactgtcacacattattcctgatatgtcatttgatgtcacagagtgttgtatttttgttttgcaaccatcagagtttcatgttggaacatatgttgccttatgtgcctaacttttgtatgtagtattatttttctaagattgatttaatttgcttataaaatctaagtttgtgtcttcttacatttgcattatccacatagttccctaactttgaagctgaattccaatgaaggttccttttctgtatcaatcatgagtgacaaaagatcatgtgtatagaatcatggttttaaaatatattatcagtttgccttttgatactatcatatgtaccaatattccagtgtgattctgagacaattcattgaattttcacattttcatttttgttgtgaatttgtcctgaagaaactgaaattctttaaattcaacatctttttcatcaaaattttactataccaagctcttgaatgagaacaatagcaaattattaacttataactttattttataaaccaaagtcaaatgagaacaaccagtttataattaattacttatagccaatgttttaactacgatgacatccatcaaatgtccagatatgaacagatcagctaattccatgcttgcttctgcttgactcttaacagctaaacagcctttaactaggagcttcttcacaatgcatcactttttgttaaattggtggatattccttcaatttatatcatatttgggacaaaacattctatataattattattcatttatccataatttaaaagtacttcataaacaaattgaaaattaagtctagcaatttatttccacttttactttctctttctccctcttcttcttccttccttccttccttccttccttccttccttccttccttccttcctctctctctctctctctctctctctctctctctctctctctctctctctctctctttctttctttaatttatttgttattttattctgaccatagttttccctctaccctcctccagtatctccccaactcccttcctccccagatctacccccccacctcccagggacttcaaccgaacaaggcataacaagctacaatgggaccaggcacatgccatcaaactaaggctgaatgaggcagtctagtaggaggaaaagggtcccacaactaggcaaaagactcagcagactcaaaagtcctcactcccactgttaggattcccataagaacattgagttaagtttttaaaatgttttagaaagataaaaatagaaataaactttctgttacagaaaaaaaaaaaaaaagagcgctgagttacataaccacgtgtatctgcagaggacctaggtcagagcctccaggctccctgatcgctgtgaacccctaggagttcctgtcagctgattttgtgttcttgtggtgtccctgacacctccggttcctcacatcctttctccctccatctgaaggactgcccaatcttcatttttgaacttcacatgtgttaaaaccttaaagattgtcatgagtatatatgtgttttgccatggtactttattgtttttttttactttattatttaatgttttttaaaatttttgtatttgaaaatccttcatataaatattttgatcatttttttttccaccacaactcttcccagaccctccccacttttctctcctcccaaatgcatgcgctttctctctctcttaaaatggtaacctttgtccaaatgtcaatgtgctttgccatgcatttatttattagttgttgatcttagcgcctatgctaatggtattctgtttagaaagtcttttactgtatcaaagagttcaaggctattccccactttcaggttcagtgtatctgattttatgctgttttttttttttttttttttgtgatctatttggagttgggttctatgtaggattataagtgtagatctattttaattcttctacatgcaaacatccagtttgaccagcatcatttgttgaacatgtgttcttttcccagtatgtatttctgcctttttttaaaataaaaaattagctggagagatggtgcagaggttaagaacaccaactactcttccagaggtcctgagttcaattcccagcaatcacatggtggctcacaatcatctgtaatggaatctgatgccctctttggatgtgtctgaagagtgacagtgcactcacatacactaaataaataaataaatttaaaagaaaaacacccttgttaattgcactccttggatcagggccttccaagcttttaaactgtataaaaattaggtgtccataaatatatgggtttatgtctgggttttcaattcaattccactgataaatacgtctgttttgtgccaaaacgacattgttttattactatagctttatagtacaactttaaattattgatagtgatatctcccccagttccttcattattctgggttgtttttagctatcctatgtttttgtgaggttgataattgtcatttcaagatctctgaagaaatgtgtcagaatttggggggaatgcattgaatctatatattgcttttggtaggaaggccatttttactatattactatatgatctgctggggacagcatacaatgacagggactgcctgcagtaggccgggatggagacatctcagaagcccatagcagctccttgtagaaaaggatggcgtctgggaccctgagaagcaggagacacatccctccaggggacctgccatctgaaataagggactgcctgcagtaggtcaggatggaaacatctcagtagcccatggcagctctttgtaaaaaacagttgttcccatttctcctaaccttagccctagacaatggctgtatagatttcatttgtgcgtgactgcttttcatttggccttgatgtgcataattattctattatatctgactttcatacttctttctccttctgctctggtgaattctgtgaaactagatgtaatgattcttaaacaattaaaaattaaggcatgatccacagcacagcacagttctaatggcccaggtacatgctgtgtgctctcatcttggaaacaatgtaataactgcacaatggtagttctggattaatgtttgacttgcaaagaaagtttgaagacattattagaaaatgaaatagagccaacactgggaccccaagaaaggaaaaaattattaaagttatgaaataagttttgcataacatttgagagtggtttttggataagcaagtcaatatataatatgtaaaatcttatgttagtaaaattaagccaaaacactaagactcttaggagagtcattgtgtgcaatgtgcagaagcagaaagctagcagaactactgagttaagggataacttgattgtttctggccactgcctggcagctttgcccatgtcatccatcattagagctttacaagaaaatgcaagtagctagccttggagctctgagctctgaagtataatcagttaaagtttaagtaatgataagtttgcaattattattactttagctataggcctgggagtagggaagcttgaaacgttggggaacaattgtaattcttgattctttgtgggacatggctattcttttgaatttgttttggcaatggttatacaatgtttccccccctgcttttcaagtatcattaaaagactggggtaagaaaaaggtgagagagcatgagaagagcatgtgaagagtgagtgaagagaaaatgtgaagagtgagtaaagaaagaatgtgaagagtgagtgaagagagaatgtgaggtgtgtatggtgtgtgtgtgtgtgtgtgtgtgtgtgtgaaagaagagtgcatgtggtgtgtgtgtgtgaagtttgtatgtgagcgtgaaaggggaatgcacagaggtgtgtgtgagtgtaagagttcaagaaaagcaaagtacatgggagaaaagcagagagcacaagagaatgcagagtgtgtgcagcctcaagctgcgagcgaatgagcgagagagaaagagagcagagaatgagagaggaaactttaagccttgaaaaattgcttgtcagcctgtacctaaaaaagtagtctggggactggagagatggctcggcagttaagagcactgactgttcttctgaaggtcctgagttcatatcccagaaaccacatggtggctcacaaccattcgaaatgaaatctgactccctcttctgaagtgtctgaaggcagctacagtctacttacatttaatatataaatatatatattttaaaaagtagtctgtgtatatttattatgtgccttccagatatccctgcttagagttgagaactccaatcctgtgtcgagggtggaccccgacactgatccatgagcctaggagatctttctatcatttggtatcttaatgtttttcaaaaacaaagtttttatcatacaaatcgttcacttgcttgattagagttacccaagatattttatagtgtttgtggctattgtgaaaggtgttggttcttgatttcttagttcataattcatttatatatagaaaggctactgactttttgtgagtattcagctactttgctgaaagtgtaggagtttcccagtgggttttttttttaggttcactcagtgattctatattatcatctgcaaatgaagatactttgacttcttctttcccaatctgtatacttttgatttccttcagttgtcttcttgctctagctaagacttcaacaactatattgaatagatacggagagttgaaaaccttgtcttgctccagattttagtggaattgctttgagtttctcttcatttaagttgtgttggctatggacttgccctaaattagcttatgttgaggtatgtttcttatatccctaatatctccaggaattttatcacaaaggagtgttggatattgtcagaagcctttctgtgtatgagatgatcatgcttttttttttgtcttttagtctgtttttatggtcaattacattcatctacttttgtatattgaaccatccttacatctctgggatgaggcctagttgatttttttacgtgttcttggattcaatttgcaagtgttttattgagtatttttagggggaaaatagtgtataattctctttcttcatttggtctttatgtgttttgggtatcagggtaactgtggcttcataaaatgaaatgggtggtgtttcttctgtttctattttgtggaataatttgaggaatattggcattaactcttctttgaaagcccagtaaaattctatgctaaaaccatctgtccctggactatttttggttggtagacttttgatgattgtttctatttcattaggggctataggtatgtttaaattgcttattgatcttattacgtgttcttggattcaatttgcaagtgttttattgagtatttttagggggaaaatagtgtgtaattctctttcttcatttggtctttatgtgttttgggtatcagggtaactgtggcttcataaaatgaaatggaataaaatgaaattattgatttactcattcaaaaagaatgaactttttgtttcattgttctttgtacttttttttttgttgttgttgtttctattttattgatttcagccatgtgtttgattgtttctttccagctactgatttggggtgtgaattctttgcggtgttctaaaggttccaaccgtgctgttacattattatatgagctctgtccctttttaaaatgcaggcgcttagtgctatgaacttgcctcttagcaaagctctcacttgtcctataggtttggatatgttgtatattcattttattcaattcttaatttttgaatttgtaaaatttctgttgtttctgttgttattgatatccagctttaatccatggtggtcaggagttatttcacttgtgtttcttgtatctgttgagacttgctttgtgtgtgagtatgtgagcaatttgggagaaagtttcatgagatgctgagaaggcatagtcttccatgtttgggtgaaatgttctgtagattctgtggtaggttcctttggtttataaagcctattatctcatctattatctccagcatttttctgtctaggttttgcctggatgccctgtctaatagagacagtggggtattgaatgctcctgctataagtgtagaaggattgtgagatttatgctgttcaaatgcttcttttacaaacttggatgtccatgttctcactgaatagatttttcctttgatgagtatggaatgttcttcccaatatcttttgattattttttaattagatattttctttatttacatttcaaatgctatcccgaaagttccctatatcctccccccaccctgctctcctactcccactctcacttcttggccctggcattcccctgtactggggcatataaagtttgcaagaccaaggggcctctcttcccagtgatggctgactaggctatcttctgctacatatgcagctagagacacgagctctgggggtactggttagttcacattgttgttccacctatagggttgcagaccccttcagctccttgggtactttctctagctcctcctttgggggccctatgttccatgaccgtgagcatccacttctgtatttgccaggcactggcatagcctcacaggagacagctataccagggtcctttcagcaaaatcttgctggcatatgcaatagtgtttgggtttggtggctgattatgggatggatccccgggtagggtagtctctggatggtccatcatttcatcttagctccaaactttgtctctgtaactccttccatgggtgttttgttccctattctaaggagcaatgaagtatccatactttgttcttcgttcttcttgattttcttgtgttttgcaaattgtttcttgggtattctaagtttctgggctaatatccacttatcagtgagtgcatatcaagtgacttcttttgtgattgggttacctcactaaggataatatcctccagatacatccatttgcccaagaatttcataaattcattgtttttaatagctgagtagtactccattgtgtaaatgtaccacatttcctgtatcgattcttctgttgagggacatctgggttctctccagcttgattagttttgatttgaagtttattttgtcagaatattaaaatggctacaccagcttttattggggaattgagaccattgatgttgagggctatcaatgaccaataattattgattcttattgttgctgttgttattgtgtgagtccccttctttgatttggtggtctgaaattatttatttcctgtgttttcttaggtgtagttaacttctgtagactggagatttccttctaatttcatctataggaaagctgaatttgtagaaagatactggttacatttggtttcattttggaaggtcctactttctccatctgttgtgatagaaagtttccctatatatagtactcagggattgtattagggtctcttagagtctagaacatctgtccaagcccttctggcttttagagtctccactgagaaataatgtgatattttaataggtatgtctttttatgttactttgtctttttccattgcaggttttaatattctttctttgttctgtatgtttagtattatatgctgagggggactttcttgtccagtctctttgctattctgtatgcttctacattgataagcatctttttcttttttttatttttttatttatatgagtacactgcagctgtcttcagacacatacaagaaaagtgtatcagatcccattacagatggttgtgagccacaatgtggttgctgggaattgaactcaggacctctggcagagcaatcagtgctcataactgctgagccatccctcctgcccaagcatctttctttaagttataattttttgtctatgattttgttgaaaatattttcttttcttttcttttctcttcttttttccctttggtttttctatacagggtttctctgtatagccctggctgtcttggaactcactatgaagaccaggctggccttcaactcagattaattatactgcttctgtctctgggattaaaggtgtgtgccactaactcatggcttaagctgtttctactttctagctattgtaaatagagcatcaatatacatggacaagcaaacatctctaaaactggataactagttcttagggtattatgcctcagagtagcttagttttattttttattttattttattttattttttaattctccatactgatttccacagtagtgctcccaattttcagtcccaccagcagtgaatgagggtccgtcttctcccatgttcccaacaccatttgttgtcagttgtcttcttgatcttacacattctgactggggtaaaaatgaggtctcaaagtagctctactttgcattttgttaaggtctaggtaaaacattaaggcctagatggaatgttaaagccttggtaaaatgtgaggccttggtaactgctacctggctagcctgccattataaggaaacttttttatatgtttctgccgttactaggaaactttctaatgcgaagttgattacatattctattatgttctgtgcccttggaaaccagtcatgatagaagtcagtagaactgttttgtatagttactcacagtaagcttggacctgaaccaaccacccagcagcatttcctgcacctgtgtataagcttttatggtatcagctgcctctggaatggatcccaacataagagagacacctgcaccaatataagaaacaatttggaataagacttccattttgagtagtggttgagtgaagtttaagttttcaagacctccctgagaactgacatcctatttggcagaaatagatgtgagtggacaactgacatcctggttggcaagttaagacacgaatgctagacaagtcccatcctgatagacaaattaagacatgaatgttacacaaggcaaaccccctgccacagttgaataccccaacccctgggaacaggtaagcgtacaacaaagacatgctcctacccctgtgcctaaatcctgattggtggagtaacttggcacagatgtttgcagatctcaggcttaaaaagacctgtaggaccttaacttggggtcatggttcaattcctgaaccaggaccatagctctggtctatcagtcctgggttgtgtgctcaaaacgcaatccctatcagactaatatcagtgtcagtgtgggttgtgaggtgattcctggaccccaacacatttccctaattgctaaagatgttcagtacctttaaaggtattttttagccttttgcttttgttgttgttttgagaactctgcttagattcatagcaccttttttgattgggtcatttgttttgtgagttctttctgtatttggaacgttaatcttctgtcagatgtgtagctggcaagacgtctctcacactctgcaggctagctcttctcttgattcactgttttctttgctgtacagacttcagttttatgacattccttttgccaattgttggacttaatttctgagcgttcccatttgttttctgttgctgtgataaaacactgaccaaaactcaacttgtggaggaaaagacttattttgttttacagtttatggtctatcattgagagacgccacagaagaaactcaagccaggacctagagactagaccatgcagtaatgctgcttgctgacttgctcaatctgcttttttctataacaggacaacttacctacaagtggcactgcccactatgggatgggccctcccacatcaattattaatcaagatttctcacacatttgcctacaggccaacctgatagagatattttttttccagttgaggttgtctctttccagttaacaccagtttatgtcaatttgacaaacactaacagtgagccgatgtagtcctattcagaaattccttccccatacctgtatcacgcaaggaactgcctatgttctagacgtttcagtgttcctggttttatgttgatccacttggagatgcattctgtgcagggtgatagagttgggtctagtttcacttttctacatgtggaaatctagtttctccagcactgtttgttgaaagtgttatctctcccctagtgtccattttttggtgtctttgttgaatatcagattcatgttcttaaacttaggtcttttatttggggccggcaccctgctgtttttgtgaccatatctcggagtataacttgaactctggagttgcaatccctttaacattgtccgttttgctcagggctctgcctctggtggtttttctgcttctttatgaatcattggattttctgcttctttatgaatcattggattttttttttctattcatgtgaagaatgccctgaagattctgttagggtctcacagactgtaatttcctttggccagatagttagtgggcacaaagttttagttttgcagactgaaaaagtcctggaaacagatgatgtttggggcttcactgaagagtcagtgtatttaatgccactaagatggcacttaaatcccttaaaaaaaaaaaaaacagctaagatggggctggagagatggctcagcccataagagcacttctgttcttgcagaggatctgggctccgttccaagaacccatggctcataatctcctgtaactccagctccaggtgattccagtcctacagtcatgtgcatgaccttccctccccatataattaaaaaataaaataaatattttcaaaagtggttaatgtagggctagtgagatgggccagcaggtaaaggtgtttgtggccaaggctgatgacatgagctcagtctccaagatccttatagaggaagtggagagtggacacacccaagttgtcctctgagctccacatatgtgccctcgcatgtaaatgccataccctataatacatacaatattttttaaaagaagtgatcaggataacgcaacatatgctctgtgtattttatataataaaaataagaataaactaaaaattttataccacagctgaaagccaatattatgaagatgatttcttcatcttgtgggtgtttttgccttaactggtccaaagcacctttccaaacaatgtgagatggttgggatgactgtatccagtctcaaacaatagtcaggttcctgttcataattaggacattcataactaggacattcctttccaagggatctcatctagcaagtcatccacttcctccatccagcaggatgtctgtccatcaaggtctggaatgcgttctcacatcctagtgacccacaaactctgtaaatgcctccatccagtctaaatgcaatgtttaagatgcaatcaagttagacatggtggctcattcctggaatctgaggaaagctgggatggagagatgtctcagtgcttaagagaatttgattttgcagaggctccacatgtggacaccaggcatgcacatagtacctagcacacatgcaggctaaaaactcatttcataaaatacagaaatctaaaataaaccacagtccagaccattcttccttccttccttctttccttttgttctttctttctttctttctttctttctttctttctttctttctttctttctttctttctttttctctctctcttcctttcttccttttatccttcctttttttttctctttttagatttattttatattgttgtgcccagattataaaaacaccaaagaaccaccaggaaccacaactctgatgtaagcacatgagggtttttattcaagctcgagcttgggccactaacctttctgatggaacaggaaggagagtgacccccaggtctaggggaagggggtttataaagaaaaacacctcaagtgggagcttctaagccttggcatattggccttcaagctaattggtttacagaactggtttaaccacagggagggagcatacatcaaaaaggaacattttgatctgggaacaacttatgttttcttagcccactcagttgttattggccagttgcagctgccgtgtctattttgcaactgccagagacattgtgtgatttttctcagacctcgagggggccacgcctctctaagggcaggttaacttaaaatggagtcttaagaacaaaatggagtttattctgctacctcagtcccttcaatatatgtgagtacaccattgctgtcttcaaacacagcagaagagggcattgtatctcattacagatggttgtgagccaccatgtggttgctgggaattgaactcaggacctctggaaaagcaaacagtgctcttaacctctgagccatctctccagcccccagttttctttcttaatttcttggttcaatccacagttgtctctcaatgaatttgtcatggtcattaagaggacacagcaggcacaggtacttgggccttgaattccagcagcagggagcagaggactctgtgagtttgaggccagggtgatctatatggaaagttccagaccagctggagttacataatgagaccttgtctaaaactaaaataataaaaaagaaattatttaagagctcagatgacttggggctggatgctagcttaaccttgcaggagggggtatcacattagacatgtttttcaaactctctctctctctctctctgagccttaagttttctcctcaatagaaaggaaatagtaatcttgttttagaggtgaaaaaaaagctaggagctagcacctgattagcagaatccactctcgtctccttccttagcaatagaatcctaggctagagtgcagctctgtggtagaacacttgcagagtggatgttcagaagcaaaaggtgtctctgggggtagtgttaagtgacccaagaagactgacacaagataggataattcagtgggtcgcaaaccctttgggggtcagattactctattacaggaatggcctaagaccgtcagaaactaagatatttacattacagttatgaagtattcacaagactaatttatgattgggtgtcaccgcaacatgaggaactgtattaaaaggtttcagcattaggagggtcgagagccactgggataattggtgcttatgagttattcagcctgagcaatatagagagactgtgtcaaaacccaacaagctggaaggtgctgttgaggtgtttactcatgacgtgtaaagaaagagataaagtcagttgttcccttgtaggctttacagagatactcacctagagaaaccaacacaaaactgtttggtgggaggttttattttgtcctccagtatcttcctctctttctaagtggtgaccccttaggggggagactgtcactttgtaaccatggctggcaacattgtataaatcactaaacccccagcaatgcccttaagctggccaggaaaacctgaggccagtaagcctatgagctgtttcaaaagtggaaattcatgacaaacagaaagatgccatcattagttgtaaagtgttttgttaaattcacttttacattgtaacaaagtcaactcaatatcctcttatacccaaaccaaccaagcaatcatacaagcctacaggcacctcttgcctcagggcctgagtcaggagatctgggtatcaagttattgctgaaccactgaatgggacatgggagcttctttcctttctgcctgtttcattgtttattagatttcatcaatcattggcatcatcatcatttggtggtacagggagtgaacccaaggcctcacacatgctagacaggtgcttctttttgctttctctttgagacactaagttacccaggctggccttgattttattctgtccttgaacttgttaccctcctgtctcaatcttctgagtaccaggaatgcaagcaagcagcacgatacgcctggctatctcactagctacagaagggcagactcatcattgatgacttcctttctcttggacagttcttgaatcttgtactttctctgaagctgataaacatgatgattatcaaggctacagggtctggtggatgcaccaatgaaaaccttaacagcaatatgtctggtaagtgacatcaaagaagcttcaaaactacacaggcagaaagtcatgttcatctctgggtctttttcgagctgtgttgccagtggatagagcctgtttgttgcagaaaatattaaaagaactggcactttccctccctagtgctgacaactctcagccccggtggcctggccagccatacactggcaggcaatggccaacctgtttttatctcatgaagactctgactcagaactccacaatctctccacccaacttgctatgttcccactggaacctggtcgttatcttgccaacaccatgcttcaatactcccatggcctttgtggtgcacatctggcaaacccatgcttcgccactgtacctttttctcttgaacacagttgatctgcagtgtgaaaaaaaatgccacacagacttaggtcagaagcaatggtaactcaatcgctgggcgcaacaactaaaatcctaatctgaaagccctattaaatctgattcctctggaacaaatctgggacaaatcctgatggatctgccatgataccaggaaactctagcagctacatcttgcccttatgctatccctgttccaaaaagggcctaactctctcctgcttcctctcttcctccgtccaacccggaagtccctcctacttgttcagtgattggttcctttattcattcgggaattgattcacaagaatagcaccaggaccatcctacaacatctgttgtttccaagttcttggcttcttaatcaaggcactgaaataaaaactcatgggaaagtagtgagaaaactttattaagccaaattacaaaatatgttagactatgttttgagtcctttaatcctctgcactcagaggatgcataatctttgtgggtttgtggccagttggtcttcatagtgagttccaggacagagactgttcataaatcctaactattgtttgagactcaaggggaaaaaggaattagtcattaaggggacatggtgagagtagcttttcttgtttttgttttttttaagatttattattttatgtggatgagtgttttaccagcatgcttacatgttcactttgtgaattcctggtgtctgaagaggcaagtaaagggtgtcagatttcctggaaccggaatcacacgggatttcaagccactatgtgggcagagaactaaaccccagtccttggaaagagcagaaagtgatcttaaccattgagtcatctcacctaccccaaggctgtcggttttgattgatatataaagcattttctactatgtatgtcctttcccataattaatttgatttgaaacatatgatggtacaagagggtaaatagtggattctccctaaaagttcacttaaggacacaattttgccttaccgtgagtgcacccaaaaccagtcctgactgggaccacctgctgtccagggccatcagggtgcattgggaatgtatttgagtagaactgtaagtttgatggtcattaaggtaggagatgggctggagaggtggctcagaggttaagagtgagtaagagctcctctcgcagaggaccaaagatcaatttccggtacccacatggtagctcaaaactgtctgttactctaggttcaggacatctgacatcctctcctggccttccagtgtacaaggcacacagtgtatgctgcacagacatatatgcagacaaaacacccatgcacataaaattaaaaataagaggagcagatatgtgttctgttattcggcaagcatgtgcttatcattcaagtgggccagtgactaaacacagggctgtaaaacctgcaaatggggaaaagcccttcgcaaagtgtgagctaatgctggcagaaaccgcagctggaccgctgtcagatgagctcgaggctctgaaaccgtggcaacaatggcagagtatgcatctgcagcttctgagaccaaaactgtggagggcatttcatttgtgattttacacacagagagactgaatttgacccctgaaactcacaaggtagaaggagagaactgactctcaaaagttgctctttgacatctacttctgtgtgtgtgtgtaaggggaaggggttgtgcttgttttaaggctaactggaattggcttgtgaccttgcaccagtgaggcagaaatacgttctgaaatggaatgaatttcaagtaagtgtgacttgaaggcttatggctagaagggcaactttaacagccttgtcttggatcaaagaattttgctggagaaacatcagacatttaaaattcagttctctggttaacaggcaacgcttctgtgcagagggagcaggaagggtcaggagtttccatccatttcttcttttgccacatgctggctgatccttgttgctgtttgtgtgggagggcggttactccatctattcatagagctctataaatgtgcctttgtattgagttctgtttcttagatggagccttccagatgttgactgagaaaggagcttgtttgaatttcttgtcccaaattttggggagccttgcctggcatgccacaggttaccagagaaatttaggtccccactttgtgttcttggtcttgtcaataaaataatttaagagggaaatttaaagatgatttattagaatctaaaagaaaaacagcagggcaggcaagctgccagggaggagggagaagaggaagagaggtggccatgccttttaagctagtctgggatgtttggaggtggaggtcagcaaccagacataaggtagataagcagttacatggcatcagatgaggaacttcagagaaaaagcaaagaagcccacagtgtcaggaagtgtgttcaagtactggccagtatctgaaagaaagaaaaaatgtttaaagaaaaaaaaaaaaagaaaaaggaaaagctatctttttctgagcaatctgggaaatcagaaaggctaatcagagccacatggaaaataaaacaccaagattaacataagaggggccatgagatggctggctcaggggtaaaagtgcctgctgccatgccttgaagaactgagtttagtctgcaggtctgacatgctggaaagatagaacaagctgtcctctgacctccacatgtgtacccagtacaaaataaatacagtaaataaagaattaaacgcttaacacataaaagaagtcagtttgtagaggaaatgggcacggtggcctgcgtgcaattccagccgcagaggatcaagggaggggaaagcagagcaggctcactgagaaccagctgtatcgatgagctccgggtttgactgagagaacctgcctcagtgactaaagaacaatgggggatgattctggacctcaacagtgtaccacatgcatgtgcatccacacatgcgtcacacacacacacacacacacacacacacacacacacacgcttgtgaaaatggagaaggaagaaggagacagacaggaagcctttacttacctgggtttttaacaaacagaaacattcttgagtaaagcctaagtaacagtgaatggagaggcaggggctacacagggccatatttcttcagtctgatccttcgagggctctttcctcagctctctgtcccacttccacctttgggagtgtttttcctttgttaataatctgcctctatttctatttctagttaaaagtccctggaatagttattttgccccaggacataaaagcccgggattatatgctatctgagctcaacttcatggcctagcactcctaagcatgtgcctgacactctgggcctcctcactgtttctctgacctccatgactaacttaaaggacaagactccttcttcatttcctctggcaggattttcagcttgcccctactatttttttctcccaaactcttaataaaaatgtctttgggattctttctgactcattttattaatgggactaaggacccccaagaagatactaagtaacaagtctgacagcctcttctttagggttaaatgaattaagtgaagaaatgtgccaggaaaggctgtgtgctgacacagagtaactagttcattctttgtctctgtccgtctcttggtgtctgtgtgtttctgtctctgtctcaatctctctgttactgaggatagaatccaggaccttataaataagaagtaagggcttcgccactaactacatcaccagcccaaatactatctttttattggccctggaaatgtaattgaacctaaaagcccctttcaggaagtatgtggttgatccttttaattaagggctctcactaatagggccggggaggagtggctccctgtactgctcctagaaagagaatggagttaggagacagaagggagtagggccaatttggagatagatggagtaatccaaaacaattcttttcttaatttttatttattcacgttacatcgaggttgaagccctgcccctagtcccaccctcacaagtcccccccccccccatcccctcctctcctccttagagaaggggaagcttcccttgggtaccagcccagcctgggacatcaagtcattataggactaagcatggtctctcccacagaatcccgactaggcagaccagctgggggaaggggatccaatggcaggcagagtcagagacagccagcccctgctccaattgttaggagactcacaagaagaccaagctgcacatctgctataaatgggtagagaatctaggtccagcccctgcactctcccaaaacaactcttatggaatggcagggaaaagcctaccttgtttgattcaagacgaaattggaggcatgctcacagccagtaagcataaataattcatacggtagtttggctaaaaatagttgagtaggtttttgtgggtacccatggctttgcctgtgctaggcaaatgttccatcacagaacttaatcagagaccatagttgctgagaagggatggctgaacgatcagctttaaacagggcatttataccatggcttgcaaaggtcagggaacaccaaggaagaggaagtggaaagaatataagagccaaaagatggggagaaaggctgtggaatgctatcttgtggacatgacacagctgaagcgattgtgatttttggttggtctctatgcactcctgcttgtcctggaactcactatggagaagagcctggtcttgaactcggaatggtgggaataaaagcacatactattacactggtttacattgttaaatatccattgttcaggcttcaacaaatagctcaaaactcttggttacacagatggtcctgattaaaagccagtcaaagaaaaagacataaattggagaaagggatttgtaagacagatcggagtttgtaaaaggtccccagatgctggaaacctggaaaatgactgaaccggcctggcaccaaacactagggagttctctaaacatcctgcaaagcctcacagtggtccaggaaggggaggggcttgcatatgttgcggtcgggaatgcgggttctggggagctcgggtggggggtgtgtcacagtccacgcccgtggaacgtgccgcgagatggttctcgcgggtgtggaaggcgcggtgtaatgttagccaattagaggcgagagagagaagcgaccaatgataaacgtctctttcggatagctttttcagcgagactccagtttggcgcacgcgcgtctcgttgaactacggggcgctgcagagccaagtgggcaaaaggggcaccactccacactccccagtcacgtgacccagaagcggcagagttccactgcagtcagggacctttcctataggcaaaggtcatagggccttgtttggggatgggtggaagggagttctatgtagtggagctgaaggcgcatcctattgaaaagtgacctcggctgaaggccaaaggtcaagagtctggtgtgtgtggggagggtgggggagcgtaccctaggctgcgcgatccgatgggggtgtggccttacgactcaatgatgtaagcgcgaggcgggctctccgctgagccccagtccagcgttgaggagggtgggttctgcatgggctcgttaacagataggtaagtaggaatttcaaccttgtttcggtgctactgcgatcgccttgacctgctgtggcctacttttagtttgaaggtggtgacgtcagggggcggacttagcctcactggggcgtggctttaagtccagtctagatgcgtctgtgggcgtggcctggcaggtcggggaggtgtggcccaggtccggcggacgatcctgcttccggattagattatagtactaagattctggctctgtgctttcttacttaggttctgcctcatggaaacttctgcggccgctgcatctgcgggaggcttcttcccctccttcctgctcctggcgtttgggacgctggtggctgccgtgctgggcgtcgctcacagactggggctcttctatcagctgatgcacaaggtgcttagggtagaaggagggctaggggtaggaggaaggcactaaaggtgtttctccagctcatccactgtgcaggtgtggaaagcgagtcccagctagtctagaagtggctggttgggagattctttacagagctctgtccctttgccaaactgtatatgggcctggactttgtaactagtacgagataatggggaaattgtcgttgtctggacagcacacattctccgcctacctccatacccaggggcctgagtcattttaacagagcaggccttttaaacatagtgagattggtgggctgaaggtaggcaggggagggaatgggctctgatagtaagcccttctgaggaactgtcttagcatatttcgtaccatcttcaccaaagtaagtgctataatttctgtccttgtgcccacaagaggcaaatgatctacagagaagtttagtattttctctagatgacagatttgggaaaagctgaccccacaagtcatacttataaaccacttgttccattctgagaaattcttgcccttacccagtcccttttcttctagacagggacagtgccactgaccttgaagtatgtagggatcgtgaagctactgaggcttggatgctcagggtagtctgtgccaggagtcacttccgtgctaggcatatggctgctggcagcatgtcagctggacctgtgcctcactagcagagggaggcaataggctggatggagttagcactccaagtgccaggccctgcagggatactaggaagcaggcacacatctaagccaggggccttctgcctcttgccaggctctcctggattctctgtagatttaacctctatctcctttcttctcaactggcccagtatctctggagcaggcattataatctccagagccacttaagaacataggctttatctcagtctgctacttggtaggctggggagagatggtcacaaattcaagccctgcctaagctacataaggagttcaaagcctcgtgagaccttgtcctagtaaaagctgatgatatagctcagtggttagagtgcttgtctaacactatctatgcccagggttcaatcctcagtacagtttcaaaaagaacatttcttctgttggagtctatcacttgggcaagtcttggcatttttagctgtaggacaaagagaacaataaatttgctaagtcagtgtacccttctctgaattggatttaaagtggtatgtctctaaccagaatctaagttcgtctgtcttctgaccttacccctgcctgttcttgtacctgctcctgggctggcctctgactgtcttgttcctcatctcctttgacccaggtggacaagacaagcatccggcatggtggagagagtgtcgcagctgtgctccgagcccatggtgtacgctttgtcttcacattggtcggtgggcacatttccccactgctggtggcctgtgagaagctgggtatccgagtggtagacacacgccacgaggtcactgctgtctttgctgctgatgctgtggcccgcctgactggtaaggaccagggactagcaggacagtgacatggcccctgtgaatgagaggcagggggtttggggtaggacgatgtttgggaggatggcatggttgtcaccagctctttctttcagggacagtgggtgtggcagcagtgacagccggtcctggcctcaccaacactgtgactgcagtgaagaatgcacaagtggcacagtccccagtcctgcttttgggtggagctgccagcaccctgctgcaggtgcctagtccttaagggtaggtggggtccccaagacggcttctcaagcttatctgataactgtcccttgccttctctgccagaaacggggcgcacttcaggccattgatcagatgtctctgttcaggccactctgcaagttttgtgcttctgtgcgaagggtacgggacattgtacctaccctgaggactgcaatagctgctgcccagtcaggcaccccaggtaggtggaggagggagctggacagtaatcaagccctgaagcttgggggttgctgcaacaggtgccatagactgaacctccctaccctgcaggtccagtgtttgtggagctgcctcttgatgtactatatccttacttcatggttgagaaggagatgataccaaccaagttgcccaatagcctcatgggccgtgtggttgtctggtgagtcctgctatccccactatagctttcttccttcttttgcctcttttgtggtcgtcttcctaaatgtatccctctttctttgtctcattcactgagttcacatgggcttggaggagccagctctagggaaagttttcctgggaaagtaactcatgtgcaaaggtcctgaggcaggagggaacttggtaggtccagcaaagcaaggcatggcccttatgatcagaaagaggagatgggcaggcatagagcttgagagatttccctgtcttccttttccttcttcttttcctccatctctgccacctagttatctctagcttctccctttcctttttcttgccccttccctctcaaatatttagtggccagatctatgtgctagatagcagaataggcaggaggtgacatcagtggacaagatattcaggttcttatgctctggtgtgcaagaattgttttgagtgccagatcaagcaaagggattttgttttgtggccttgcccaaaaaattccggcccagattctgtgtagcccagactgttctggaacttgaaaattctctttcagcctctcaaatgttggaatcacagacaggtgccccaggtctagtcttgttaagactccctgatctcctggtctttctgtcctcttctctccttgtcctctctctcagtgtcacttggaagactggctctttccctgactctcctttacatatttttaattttaatggttttatgagagaggaggtagctttgtacccgtgctggctcagtattagtgtgagtcctcttgtctcagtatccctggtgccggattctctctcctttttaaaccacagttcccccaccccctcctttttttcttggcctcattaactccctatagtcatgcctttaacagacaaaacaggtgttggctctgagctctgactgcttcctgtgtgtctgtctttagtgagattgagtgttccttgagggcaaggcctgggcaggatttctttttgtgtcacagggtctaagaaactcaaggcctgaggcctagtgtgtagggagacaggaggcactgcaagatccgaatgggtaacattaacaaccacagcctgcattttgtaaagtgtttctctccttcccttgcaatggtggtggagatggaacctgaggcttcatatgtactagaccgggcctttgccgctgagccacactcccagaccacaatgtgccttataacctaagacggtagatatgggaacatccccattttacagaggaggaagatcagaatgctgaaggaactggaccaaagtcacacagctgaggtgctgtagggctagggtctaactcacaaccctagtttctgtgctggcattctccacctgttaatgtgtttcggggaactgtgtcaagttagggtggcttcctgaagggttggagttggagacttggtcatttagtgtctcgtattatggtttgtcctccctgattcctttcctgcccccttgcttttcctcaacccccagaatcctgtattcaccacggtaactggttcctccctgttctcacaggtatttacagaactgcctggccaacctctttgttggggcttgggaacctcgtcccgagggacctctgcccttggatattccccaggcatctccgcagcaggtaaattaactctctttcctggcctatgactctcatttggcaaggtgttgctgatgtctttgggccagcactgggacctctatcttgtgggctgatggcaacccgacgatgatcctttaataattttaaaaatgtatgtgtgtttgtgtattgtctgtgtatcaccgcctgcatgtgggggtcatgcaggggtcagagtacaactttgtggagttggttctctctttctgcttgtgcatgggttctggggcgtcaactcaggctttccaggcaagtgctattacctgctagctgtcttgccaacctgtgggatggctctttggtctctacttatcactccaggtccagcgctgtgtggagatcctgagccgggccaagaggcctctgctggtactggggagccaggccttgctgcccccgacccctgccaacaagcttaggtaaaaagctcccactctctcttaaaatcatggtcttggttcctggtgttccagtggccttggccatactgacatctgttctacctggacccctttccctgccagagctgccgtggagaccctgggtgtcccctgctttctaggggggatgtctcgggggctgctgggccgcaaccaccctctccacatccggcagaaccgcagcgctgctctgaagaaagcagatgttgttgtcctggcaggtaggctcagcctcctcttttccttcccttcatctggccctgacattgcccgtcctcatctgtagcacccttccgttgtgatcactcatctgtcttcctctgcatgcacccccttctcttctaaaggccactgagcaaactcaccccagactgcagctttgtgctgtgacctggcttcccctagaggatgtaaaccctgtgggcacttgctgtgtcttatatacctttttacacaaagcattttctataccatcaggcacaaaacagcttttgctctgtacagctgtgtactgcttaaggcagactgcatcctggagatgtgtccctaagtgggttttttgtgtggattttgagtgtgcatacacaagccagtggttggctgggacacaaggccacagtcgtgtgtatgaactgttaccgactggagtgtcgataggctatacgggactataatggtaccccatatttagtggtgttgataggctatacaggactatagtggtaccccgtatttattggttatggtaagttcatgattgctcatgtcttaccagtaggtcaggtaacaatgctctgtttggctgggctcatatatgagccaggagttggtaggaggtggggtgtctgtccccgtggctaattaggtatgtcttgggttgggtaactgaatctccacctatgctcctcacactacccctcaaggtccatttgtccccagttccccagtgccactcctggcagaccagcctggtggggtaatgtgcttactatttttattttcttctttgtggttttgaggctagaacctaaaaaccagggtcttacacatgatgaacaagtatcatgtgctactactgagctacatacgccccaatctccattgcctcttgagttcttcttgtctcagtgtggcacaccattgcttttgtcatgctctatcagagccattcaggaaaagcctgtccagaatcgagagctgtaaagtcaggctgtctagatagcctagtgggtaaaagtgcttgctgccaaatctgatgacctgagtttgatccctggaactcacagagtgagagtagaagattggcaagttgtcttctgtcctagtgcatgaagcccccctctccccaatacatgtaaacagctggaaagtccctgcaagtggcacagatgcagggagagtagggatggggaccgttgtacactcggcgtgccacagtgagctggaagtgaggtagtgctcattgccacctcaggcgctgtgtgtgatttccgcctgtcttatggccgggtcctcaaccgcaagagcagcatcatcattgtcaaccggaaccgggatgatctcttgctcaactcggacatcttctggaagcctcaggaggctgtgcagggtgagtgtaccccaagggaccccaccatgtgcatggtgtcttcatcttgcctctgctgcatctagcttgattcagtatcaggtctggaccacttgggcaacctgaggcacacttgcctgcggactgaatgggtgcttctgaaggagcggagggggagggtaggcacagagggaggtttggggttttgaggtgacaactcctgaatgctgtctgttgctttcagctggaccagcctctccgtgaatcttaccctcctcatttttgtccccttgccatgccatcctctggacactgttctaaggacctgggctctcttgtagcgtaggcagcagggtccctttgatttagctggggaagtggtaccaccttgtgtgtttgcgaaggtccctcttacaagttggtgggcagcaggctgaggcagggaagagctgttaagaggagctggacaatctggggatgctgttgcttgcttccagctacttggtgggagggaggtgggggaacagagaggtgtgttggtataacttagcaaaacctatctcaaagtaaaataaaaagaactcgagtgtcacacatggtagtgtatatttggtttttttttgttttgaaacagggtctcactatgtagctctggctgacttggaactcactatgtagaccagcttggccttgaactcacatagatctgcctccctctgccttccaagtgtagagattaaaagagtgtgccaccacaccccgtgatgatggtacacatttataatcccaatatcaagcaggaggaacaactgagaatttgagccaaaccctggtcgaacattgagtttaaggatagcctaggctacagtgtgatatcttatctcaaaaaaaaaaaaaaaaaaaaaagcccaacagggaggcaggggtttgctaagtttggtggcacaggcctttttaatcctagcactaaggaagcagaggcagggagatttctgagtttagggccagcttgttatacgtagagttccaggccagccagcaagcactgcagagtaagatcctatctcaaaaaacaaagcaaaacaaaataaacaaggaaataaaaaatcataaccgaaatgagcctgacaagatgttaagaaggcaaaggcacgcccttgccaacctgatgacctgaaattgagccccagaacccacatggcggaaagacagagccccccactctcagtgttgctcaccccccccatctatacacacggtaagtcaataaatgaaatagttttgttaggtgttggagtgtttactggggatgctctaggcgctgggtttggtccccagtactgcgaatttaacagatggaggaggggacaggacagcaattatatgacctggtaggagaacagactgggtgagaaacacagccctgaatgggtattcaggatggatgttgagaaagaaagctgtcagccattcagtgtttgctgtgagttcccatgtgcttgggcttgaaagatttccttggtggatgacatattttggaggcagatggtgtcactgaggtgtgaggagcagggaggtaatgaggtcagcttgggtttgtagatcccctactccccatttcccaggcctcgcctccatcttgccaggaccctctcctgggttctcagagactctttgaggggcttcacctgatttgtcctaagaacacttctggtccattttctcgccttcctttcagatgctgctgttggcttcctgttctatttggggctctggtgttagaagggcaaggggaagctgccatcctgtggctggtcctacagctatactttcttccattcctaggagatgtgggctccttcatgataaaactggtggaaggccttcagggccagatgtggtcttcagattgggctgaggagcttcggaaagctgaccagcagaaggagcagacctatcggtcagtctgggtcgagtggacacggcaagagtaaggaggggaaggggctggtggcagccagccctactgacttctgctgccctgttgcagggataaggctttaatgcctgtattacagcacctgaacccagtatgggtgttacagcaggtggaggaaactctgcctgacaatgcacttcttgtggttgacggaggggactttgtggccactgctgcctacttagtccagcccagagggcctctgcgctggctcgatcctggtaaggaaagtcccacactaggggcagcctgtattctgtgcacccttcacagcagtgtgctcttatctttctaggggcctttgggactctgggagttggcgcaggttttgcacttggggccaagctgtgtcagccggaggctgaggtgaggcattggatgtgggagactaactgccttctgggctgcgaactaccctaactgccctgggtcgtctccccccctccctccgctcctcccaggtttggtgcctgtttggggatggagcctttggctacagcctcattgagtttgacacgttcgtcagacataaggtgactgggctgccctgagggaagattatgagggttctgggatatgtcatttagggtggggctgggggggtcggggtttttcctcagtgagccacaggccctgttttgttgctggtcaaacttttgaaggctgaaggctgcctcttggcctcctttttttttttttcccctaacaggtaccagtgatagccttggtaggaaacgatgcaggttggacccagatttctcgagagcaggtgcccaggttgggcagtgatgtagcctgtagcctggcttacactggtgaggtgtcatggtgttttgggcccagctgggcttctgttaactctctgggtgtctctgctatggcctgacatattttcttttagattatcacaaggcagccatgggcctgggggcccagggattgatactctcacgggacaataaggatcaagtggtcaaggtacttcgtgaaggccagcagctgtgccaggatggtcatgcagttgtggtcaacatcctgattgggaggacagacttccgagatggctccatttctgtatagggactatccagggttagtgtgcttgcctctttggaccaggactttgtctacctggagttttcatccttgcctgtcctgagcttgtctcataaggtctaaccctctaagtggggaatgtgggggtggggaaccaaagctcaaagaggcaccttggcaaccctgggtagctctttccaaaaggttcagctgtaccctctctcttacaaaattaataaatctcttggctatatgagcccaaggactcagtcacagaatctgtgtatactggtttatttactgttcacaaagatggaagtggtggaaagaagtgggagacaggaaggggccctaactctgtcaccattggaagattttggggtgccaggcaatggaaaatcctatcccactctatggtccctgaaagagttccacatatccattccacacaggccagtgcacacgaatcctcacacacagacacacatgcatggaggcaataaatattttccgtaccaaagatcccccagcctgatacctcaggtggggtccctccaaaaggggaggagttaagtgctcagtttttcaagggtggggaagggctgctggggaaaggaaaggtctgactctgtctccatttgctggttggaaattcatctcggagtttttgctagaagagagggttaggggaaatcacctgtttctctctaagctccaggccaccttttcacaggtagaggcagagtctggtgctgtttcccttaagtagaatcccatgattgcctttagatacttcaagggagggagagagagtgtagtgctcaatgctaatactggtttggttggcagcagcaagagggttgactagggatgttttaacaccccagggtgatgctcacagtaattggtgttcccctgcaaaggggaggcaagagaggccagcctagcaagcagaactgtttctggcagcaagagaagccccaatgctcgggagaggggccatggcatcagtgctgaaaatgccaagagcctggtttctgcagctagggccccaaacaatggcactaggaattgggaatgatttttttagcatggaaggctggccccttggcaactccctagcaaccaggtgctcagtctgagcaactctggtcaggtccttttaggtcatcagggccttagtaacttggaacccagtcaccagtaatcagaacctggtccttagcaaccaggaagcaattccttagtaaccagagtccatcccctgctttgagggctcagaggcacacattgatctgcttggagagttctctctccagatccaggatgagggcatcaaagtctttgagattcaggtgtgggttgaagggtgcatcaaactcatcttcgaagtcggtagtgcccctcggctctccagtctcatcatcatcttcctcactgtcgctgcctgtcacatggtcatagtcaggcccggacaggaagtcccgcccacagggcagtaaatcgcctccgcacacactccagtcgcctgcatagcggttgcttgggggactttcggggcctccgcggccccgaggccgagtcaccacttctgggcccgccagcggcaagtgcagaggtggctgtcttttgggcctcaaatacggtgcgactgcgccatctggggtatctgagggccgtctggtatctgcggggtccaaaaggaggataagttgtgatacaagggagtggtccctgattggccttttgagaggcaagcttacaaatttaactcactcatgaccctccttagattccaacccatgattggtcagtagggaagcataaatgtgtaagggaggctgactgggatgggcggtgttcacctggccaagactgtaacaggtaatgcaggacttcaatgtggcgcttgaagtccacagcactggtgactcctgggccagagctacggagccggggccgagagggtgtttgtctcgctggtagcaacactggtccgaagcacactgccaagttctgcggggtcatgcggttgtgggtgtggaaggaagagacaaggcgcagatggtccagaagaagcgtcagggtggcctgtggagagagttgctagggtgggcacgaggcgggcaaacctgaacccttgtggcacttgcaggatagtcaggggtggcttagagtggaggcacttcagttcaagttctcatagccagaggggaggggttagtattaggaatgcattttgccaaagttgagattaagaccaaaagcaatttagctttggaatggaagggtttgaactccaacccatgccgtgtttggcaatttcaaggacttttctaagatctcacagccagtatttttgcttgtgttaggttggcagatctgtttgctcagtttgctaggcagcccagtctggcttggaagtggctatgtggctcaggctggcctccaactagaaatcctcttgcttttgactcttgagtgctaggagtagaggcgtgtaacaccgtgcctggatagagcctgtgtttggacagatctggctgtttgacctcaggcaaatcaccaaactgagccttgatttttttttttttaacccaggaattgacagatgaatatcaagtacttgttggcattgatgatcatgtatgatgattacatcttaggcatgcttaaagcactacactggtattagctgctctatgagccaaagttcctagcatggccgactcaccctctccacatctggcaggcatctgaggagccctctggtgccctcaggacccagggaagccctgcttgggtgtccttgggccatggcttccagcaccacctggtagaggggctgggtgatgagtggagtaggcagttctcgaagataatccttgaggatgcctgtggacagaggggttctctctggttaaggtaccctggcttctgaagccagaggaggggtcactggggctgacagtggtagtgagaagagggcaggtataagaaatgaaaataggatcagacaggagagaggagggttcacaggaggcctccagagcagcctggaggtgacaactgaaagaagtgagcaggcagtggagaaatggctgacctgtgatgacattgatatcagggtacacatcttcagagaggcacacagccgcactgtcctgctcaaaggcatctcgaagctctttcttcactgctgctgagccacacagacggtacagccccactacctggggataaagagaaagaacgtcttcctggagggccataagacagcaaagcctggatatttggacaagggtgactgtggatgtgatggcctgggagggtagggccattcacatgcatcttcactggctgccttcccattgctgtcacaggggccctgagccaggcctagtacttcagcactctgaggccaaggcaggagggtcacttaggctataatatagtgtgtgttcaaggtaagcctaggtaacttggtgaaaccctgtctcaaaaaataaaatgaaggctgagggtgtagctcaacagtaaagtgcttgctgagcaagtatgagggcctatgttcaatccccagcactaggaataaaacaaaaccagagacacataacctagctttctaaattccccaaggttggaccacttgtctagagtctctttcctctgacttcacagttcacatcttccaggaagccttctcacactaacccaagcaagtcaggaagtgagggcccgctttaagctgtcctataccctcccctccttactgcttctttcctttcctttcctttcctttcctttcctttcctttcctttcctttcctttcctttcctttcctttcctttcctttcctttcctttccttctctctctctctccccttccttccttccttccttccttccttccttccttccttccttccttcctttctttttttcgacaggtgccaccacactaggctacctcctttctttctttctttctttctttctttctttctttctttctttctttctttctttctttctttctttttttagaggctaagggcatttttgccactagctggacaacctgagtttgatccttaggacccacatgatggaaggagagaaccaactattttatctccatatctgcactgtggtgtggtacacacagatgcacacatattccataccaagcaaataatatgtttttaaaaactaaagagagttagtgataggctacctcctttcttaactccccctggctacctcctttcttaaccccccctgccagctagtttgacatttatgaaagtccaatcatctttctcactccaaagactgagctccatgagggctaagctcttgtaataaaaaggacagatgatccgtgggtcctgatgctggggagggagtgttgtttaaggggttccaaggagtatgtatgtctaaggcagcaggagtgggggcagccagctcacccgcagccctcggcattcgatctgccccacacactttcggatgatgagaggcacctggcctggggactgctcacgttctaccagaagctgcagagggagcccgaaaacacggggctctgctgtggcaggggcttcttgctgttccgacaatgttagcttggcgtaaagaagtccctggggttcaagtcgaacggccagttgttgcgcttggcaccctaaagatgcaaggaggactgaggcaattttatcctaaaagtttctgtgtcctgactcccctcatctagaacacccctcaatcatgaagcccagccaccatgggcaccatgggagaacaggaggcccttaggtgggtctttgtttcttgctcttacttcctggaagtcccacgtcttacctcgaaagatggttggcaatagcacagtgccctgggcacagggccggtgccgcctcacaccagggtcccatgcaagtaccaaggcccgcagcagacgagcagcctccagctctaggtggaaggtgtggtccagcctcaggaagtctggtccgcttcgaagtggccctgtgcgggcccgagctaccccatccacttggagaaggcagcagagatctcgtggagtagccccgggacttggtcgcagaccccctagcccatacaggtgcaggctgagacgcccccagagggcagctggaggagtccgggccgatggacccacttcatagggccggaaggcagtgggtgatggtggtcctccaggacgctcaggcgaatcaccatcgctgaggtacccaccccttgggctcctagaccctccagccactgatgcctgcccaggagtccccacactgctgtccaggtgatagcggctgatgacagagcctgctggggcggtcctctctctatcccggcctgtgcgagtacttcttaggcttaggcggcgccggagctctggcagctttttcatcttcattgagaggcgcctggcagggcctggggacttggtacgggaggttttggtaggggggctggtaggggctgcacctgtagggagagcaaacttcagagtccagggcctgggattggagtatgaatcttatggtccttgcggggctgaggataataaggcttaggaacacctggagtatagggtttgaggcttgtgcatgcttgtaggtgaatataacactttgtgcttaccttggatgttggggccttctggctcagaggaagctagctgtgatcccaagggctcaggtgcgggtggtctggggtcttcttcagggatggggttgtaccaaatctcaccagcaggctccccactgctaggtgtcctaggccccaaagagatctcctctggtggtttagcccctcctagcacccatcggcggctactgggctccaggctttgcaggtaggccccccgagtggggcttcgaggtgtctcggggctgggtggtacctctgctccagcctgagacccttcaaggacacgaggttctggttctgggggtttgggctctgagcgctgggctgggtggcctggtggagaatgaagatggtaagacccaactctcaagttcccagaggtccagggaggcagtctagctaattggcttcagccctcacttcacataaccaatcgacagcaaggaagctctttgctagcctggagccactgcctcctttggaaccagctgttttgtttggtcctagcagctagctaatacttttgcagtcctagcttcaaggtcccctgccctagcccctagtaatgcaaaagggactgtgaatcagcctcaagagtccaggtcaaatgtccttggaacctcaggacatttcggctctgtcacccctctcccagacattccattaatcctagaatcttacgcctgccccttctcattgagtggccttgagcaaggcatttttcctgatgctccatgtcttgtttatgaggagattcagtattatcatattctcttctcgacccccttccagcttggagctcagtgtgagaagcaactttagacaataggatctgtagccctgctcaaggccctagtagctgctgctgggaaggcagggcagggaacgctggtttctttttcattcagcacccttttcccatttcccaaatcctgcccacaagttctcttggatcttgcccctcagcccaagccagatttctacagtcagtgccccgttaccccgccccccttatcttggctctactttctctgacatcatggtcgatttcctgtgtgtgtttatgtgtgggcacccggatcccttctctggccctgggacccttgggatgccctgggaacggcccgggaggaagagtcaggtccttggtatagtggcctccctcctttaactgcttccttccgaagccccctacccatacagctttcgttcctttccatttcattcttgctgtctgtggacccccagatttaaggatcttctatttccaccctttggccctctgtttcaggtctctgtcatcagtagcatagtccagaggattgtttaaagtcagttcacaggcccgggacaaatcacccaacaaccacgtgcctcagtttctctgtcttaataaacaggacggtttcttggggctggccacagtaggtgcggctgcagcctctggagcgatggtggcatggaattggggaaaagactgcaataataaatataaccccgcacgacctctctttagtacaggagtgtgtacccaggagaggtgcccaccacccagccatgtcgatgccacacagctgtcctcacctcccgcccctgccccgccactctctgggcgccccttcgaggccccatttcctgtcaggggtgaggcccccctgcggggccttgcaaggatccctggggctggcatctcaggccagctgcacataacggtccgtgccccccgccccagccccccagccttacaaagatccggtgcatattcctctcttgcatcagggctcgctcccggcttacccactaggtcccgctgcgtaccctaccggggacctggggatctgaggctgagtggggctcccttctcttactttccgagagtccccgcactcaccgcggtccttggcttctgacttttttcgaggaagtttctcacgaccccgcaggcgggagaaggtcttcctgagcagcggctcggccatgcttgggccgcggccggccgagtgcgcgccccggggctgcggccgcccgccccgcccgcctacccccccccccccaccggcccgctccagcaggaagcgcattccgggaatgcttggccttaactttttttttttttttttcttttcctttcccgcggcccgagcaggcgatgctgggagatgtagtcgcctggggccgggaggggacatgatggggtgctgggctgatctaactcttcaactatgaatgtcatggcataggctgggccccccataaccatcctccttgtgtgatggcatgcagcacattctgtcggctcccccaaaccgcatccaaggcacacatcagctcatgtctttcctcctgtccgtccatccatccccacatcacccagtacctcgaccacgatctttccttgggaaccccaaatgcccccaactcaagttactattgctgcttattgaccctcaagcttagtggtttcagacagccgggatgctcactgtcaggaacatggacgcgatatagacgatgcagtctgctgatctctactcagtcgagaacacagcaaggataggtgtatctcgaaagtaagtggtgaaatcggaggttgtattattattttttatttagtactgaaataccggaggctggacaactttctaaagtagactgagttcatgttgatgtcctagcagcactccttaagacaggaagagaaaaaaaaatcttaggtttgggctgattcttacaacttaagtttactttttattatgaatatgtgtgtgcttctgtgtgtatggcacatggatcggggtgtgtgtgtgggtgcccagaaacggctgggaaacaagcacttttaactgctaatttggtctcacagaaccgtcttctgaaggccaactcccgccgataggctcctttcaccatgactagcctattaacagggccacatagaggactaaactttcaacacatgaactgtggcacaactaaagttcaggtctcttaactggtgccagacacaggctggacctccactgggatagtggactaagcacctatgtggacacctctgtgtccttggcttcctcccagttcagtagttttgtggtaattggtgggtatgcaggcgtctaaaagttaagagtgcagatgagtagaaggaagacctgcccagctttgcttatccaggcacatgtgggaggagaaactgtggtgctgcaatagtttgaaaagatctagtacattctaagagactggaacttttgctagaccttacagccagagataataccacacctggaagtcacccacgactgctagcctcctatgtactcattgagtaagagaacaatgtagcaatcaactctacttgttttggatttcccatgcaatcaacttcttacaacctataatgtaatgcatacctggactcttagattaggtactcttcccggcccctcactcagataatgcacacgaaagcaacacttgcagaagcagaagcaactttctaccaaaaaaacgtcgaaagtatccatttacagaaattagttgataaacagtgatgcttgttatctgtgtcaattagagacagatggagctagcaatttaatcccttgtaaaactctgttaaagacttctgtaaagtatcccattatgtgctgttcaatccatatagagtaaaacacttccccccccctctctctccccccccccacacacatacagagctcataccaaacaggtggacagacaggaacagatacagatgcaggcatacatttagactcatgcaacagatagaggacagaaacaaaggaagtatgaagtaaagaattcaaatctgtattcttggttaaatgactccaagaagagcatttgtttttaatgtaacgtggatgcatcattggtaactcagagttaatcactgattaacccaggcaggatatagtgttgtgtcctccttaagaaataaaacctgcttcacacttgcgttcgatgctacattcagtgcccagggtggacttggaactaagatcacattcctgaacaaagtcttttcaccaccgttcaccccacccacccggaaggtgtagatcatcaccacaacctgcatgaattcttgggtcccattgaagtgttggcagagacttttcctcatttccagtgaagttcttgtcccacacaccactaagagtacaggtgggaggaggtactttattgtccatttgggattaccaacttcaatgaggttaaactttaagcactcgggatttgaatgaaacagggttgaactctcagtagcaccaatgaagagcagccttttttttttttttttgagataatctggagtcatggatctcaggtcttgaggctggaagcagctgcaggaaagaattcccttctgccgcctatgagtgagccgtcttgacgtcttgacagctgagtcaggaacaaatctccctgcagctggcactggttgagtcattgaggttggcttggggcagaagcctcaggcattagagttgctgactagtctgtccaggtaagtctaaccttgaagtcttcaggcttcttcctctgcaaagagccagaatatctggggctgggttcccagctcaagctaggagctgggcgcgaagtctttcttctttcctgtctctactggattctgcagctgctctggctttgcaattccaaatatccaaatttctagagatgtcagctaggtacaaatgtgggtatacaaataagatgaaagaaatgggactaatctatcctggttggtgaggggaggaaccctgaactagctaaaagttgtcagaagttcatgatcacatctgcagatctttatctctgcagaggcagagaaactacaaagaaagtttctgcccatccctggttagtactttgatctctgaaggcagcctacagcttcctttagccagatatttccttctataaggttaggtgtgtgtgtgtgtgtgtgtgtgtgtgtgtgtgtgtgtgtgtgtgagtgtgtgttagaatgggggggtgttggggtagtgttactgcagatagcagctcctcagctctatatcagggaaccctacctatctctctggccatgggatttacttactatggttttagtttgggtcttcctgttgtgtccctgtttttttttgttccaaattaaagttttcctggagtcaggctagataagatttaggaggtaaacacacgtctcaggaagttcttgaaatttacaaaattcaccaggcctcctcaggattatataagtagtggcaatcactagaaaggggcttcactagcaagtttttcactggagtttttcctccagggtacaacagatgtagctcaatggcagagtgcttgcctagtatagacaggacccttggtttgatccttgcactgtgaaaaaaataaattgtgactccctctattgtgtcatcaaataagtcttgtgggacttctaaatacaggttcacatagatgaaaatatttgtcccattctgtggagttcacagagaagcggacatttggcagttagaacttccgtccgtgagaccctccaccccctccagatgaagctttagttctcagagtgtgccggaagtgactttctgcccactctcatcaggttaggtctctccctccacgggacagccctgagctatcaggtagagatgtagcccacataaatggctaccaacttcatgatgaatagggtgttgtgtgtgtgttcacagcaacttgaattggaatccttcatgtctttgttctggcacacagtcttgggacagtaagtatatttgagttcacagttttgggttttgtttgtttgttgtttcatttggctgaaagctcatgtttgagtgatc

SEQ ID NO: 88 - DNA, 1282 bp, Homo sapiens
ctgcgatcccgcagggcagcgacgcgactctggtgcgggccgtcttcttccccccgagctgggcgtgcgcggccgcaatgaactgggagctgctgctgtggctgctggtgctgtgcgcgctgctcctgctcttggtgcagctgctgcgcttcctgagggctgacggcgacctgacgctactatgggccgagtggcagggacgacgcccagaatgggagctgactgatatggtggtgtgggtgactggagcctcgagtggaattggtgaggagctggcttaccagttgtctaaactaggagtttctcttgtgctgtcagccagaagagtgcatgagctggaaagggtgaaaagaagatgcctagagaatggcaatttaaaagaaaaagatatacttgttttgccccttgacctgaccgacactggttcccatgaagcggctaccaaagctgttctccaggagtttggtagaatcgacattctggtcaacaatggtggaatgtcccagcgttctctgtgcatggataccagcttggatgtctacagaaagctaatagagcttaactacttagggacggtgtccttgacaaaatgtgttctgcctcacatgatcgagaggaagcaaggaaagattgttactgtgaatagcatcctgggtatcatatctgtacctctttccattggatactgtgctagcaagcatgctctccggggtttttttaatggccttcgaacagaacttgccacatacccaggtataatagtttctaacatttgcccaggacctgtgcaatcaaatattgtggagaattccctagctggagaagtcacaaagactataggcaataatggagaccagtcccacaagatgacaaccagtcgttgtgtgcggctgatgttaatcagcatggccaatgatttgaaagaagtttggatctcagaacaacctttcttgttagtaacatatttgtggcaatacatgccaacctgggcctggtggataaccaacaagatggggaagaaaaggattgagaactttaagagtggtgtggatgcagactcttcttattttaaaatctttaagacaaaacatgactgaaaagagcacctgtacttttcaagccactggagggagaaatggaaaacatgaaaacagcaatcttcttatgcttctgaataatcaaagactaatttgtgattttactttttaatagatatgactttgcttccaacatggaatgaaataaaaaataaataataaaagattgccatgaatcttgcaaa

SEQ ID NO: 89 - DNA, 1506 bp, Homo sapiens
cagataggcgacacgcggcgggcgctgaggcgggaatggctgctgtactgcagcgcgtcgagcggctgtccaatcgagtcgtgcgtgtgttgggctgtaacccgggtcccatgaccctccaaggcaccaacacctacctagtggggaccggccccaggagaatcctcattgacactggagaaccagcaattccagaatacatcagctgtttaaagcaggctctaactgaatttaacacagcaatccaggaaattgtagtgactcactggcaccgagatcattctggaggcataggagatatttgtaaaagcatcaataatgacactacctattgcattaaaaaactcccacggaatcctcagagagaagaaattataggaaatggagagcaacaatatgtttatctgaaagatggagatgtgattaagactgagggagccactctaagagttctatatacccctggccacactgatgatcacatggctctactcttagaagaggaaaatgctatcttttctggagattgcatcctaggggaaggaacaacggtatttgaagacctctatgattatatgaactctttaaaagagttattgaaaatcaaagctgatattatatatccaggacatggcccagtaattcataatgctgaagctaaaattcaacaatacatttctcacagaaatattcgagagcagcaaattcttacattatttcgtgagaactttgagaaatcatttacagtaatggagcttgtaaaaattatttacaagaatactcctgagaatttacatgaaatggctaaacataatctcttacttcatttgaaaaaactagaaaaagaaggaaaaatatttagcaacacagatcctgacaagaaatggaaagctcatctttagtttcagattaaagaaagctttgttttattttgctttgagagaatggtatgttttcttaactataggttattttatagagaatataaaagtataaaacattaaaaataaccctagatatactttaaaataatgttatatttatgctaaaatatgtaaattacactatacaaccatatgataggttatttctctaaccttgtcttctaacgttttaccaaaaattcataatctaatagtttatcagttttcaatagattaaataaaatgattactttaaaaataataaaatttatctaatttaaagttgatattatttttggccgttagttatctattactagtgatcagttatactgttttctatagctactttatttaacagcacagatttctatgcacctttactctttcctcaacccttgtctctatctgtacataattgctttgtcttgatgtttctatcaactatatcatgactatctattggttccataactctgtatcatgtgtattttcttattctggtataccacaaatgattcatgcaaatgaatttttggtgattgaaaaatattaaattcccaatttaaagtattatatgata

SEQ ID NO: 90 - DNA, 2880 bp, Homo sapiens
attttttgctcagcccgcctgcgccgcttgggacgcctctgcctttccctccctcccttccccgacggcttctggcggccaagcggatgtggcgggtgatcgagccaccctgcccaggggcgcccagcactggttcagtgaacagcattttggacaggacatttggtgccaggtctgagtagccagtttgctgaattattgtcccagtcagccaggattgtgagctgtttgggaagtttcgtggaagcgcccaagtgccagcacaggtggagggacacctggaggccagtttcaggaacttttgccacaagtataaaagacttcagaagtgcaaagatgctgaaacagatactgtcggagatgtacatagatcctgatctactggcagagctcagcgaagaacagaaacagatcctgttcttcaagatgagagaggaacagatccgacgatggaaagaaagagaagcagctatggaaagaaaggagtccctgccagtgaaacccagaccaaagaaagagaatggcaaatcggttcattggaaacttggagctgataaggaagtctgggtatgggtgatgggcgaacaccatctagataaaccctatgatgtgctctgtaatgaaattattgctgagagggcccggctgaaagcagaacaggaggcagaagagcccagaaaaactcactctgaagaattcaccaatagcttgaaaacaaaatcacagtaccatgatctgcaggctccggataaccagcagactaaagacatctggaagaaagtggcagaaaaggaggaactggagcaaggatctaggccagcaccaaccctggaagaagagaaaatccgatcactctccagttcttcaagaaatattcaacaaatgttggcagattcaatcaatcgtatgaaggcatatgcatttcaccagaagaaagaatctatgaagaaaaaacaagatgaagaaataaatcaaatagaagaagagagaacgaagcagatttgtaagagctggaaagaagactcggaatggcaggcatctctgcgaaaatccaaagcagctgatgagaagagacgctccttggctaaacaagcacgagaagactacaagaggttgtccctcggggcccagaaaggaagaggcggtgagaggctgcaaagccccttgcgtgttccgcagaaaccagaaagacctccccttccacccaagcctcagttcctaaactcaggggcatatcctcaaaaacctcttagaaatcagggagtggtgaggacactgtccagctctgcccaagaggacatcatccggtggtttaaagaggagcagctaccacttcgagcgggctaccagaaaacctcagacaccatagccccctggttccatggaattctcacactcaagaaagcaaatgaacttcttctgagcacaggcatgcccggcagttttctcatccgagtcagtgaaaggatcaaaggctatgccctgtcctatctgtcggaggacggctgtaaacatttcctcatcgatgcctctgcagacgcctacagcttcctgggcgtggaccagctacagcatgccaccttggcggatttggtggaatatcacaaggaggaacccatcacttccctggggaaggagctccttctctatccctgtggtcagcaggaccagctgcctgactacctggagctgtttgagtgacagcctccatcagggtcatcctacagcctccaagcgggctttcccctggacaaatgccactgcaacatttatgtgtgaagccaaaatcaccctgcagcagagccaatactgatcaactgaaagtaaagtatccatggagtcctcattgacacctcttttctgcacaaatactggaattcaatgtcaagagaaaatgacctctgctcaaaagggagaagagtctcaatttcagcaagtacctgtcatgaagggtatgaccttaatgatgtacataaaataaaacaaatgaagaaatggaaaacttttagaaattaaggtgtacttgaaaacgaatatctatcatatgacccctgcactccctctgtatcatctcaggaggtttcaggggcctgttgacatgaagtttcgaagtttcatgttggctttggaatggtagcaaaagcctttcctggctgagatgatgcttaaaacacacctcacttattgtacatgttggaaccaggacatgagagacatagaaaaacagaagtcatgaatgtaaattgaatgagaggcttaacatgcatgaaaatacagatggacctgcaggaaagtgagcaaacatcgctgagtttgttttcttgttcgggagaatggggccggggctggcctggcctcccctggatatactctatagtgcaccaaaaggataaagcatctgtacatgtatttttttattttttatcagaagtgcttagacaagaacagaataagcaggctgtttggatgctacttgtggttgaattgtgttcccccaaaatatatggtgaagtcttaacccccatccccgtgaatgggaccttgtttggaaatagggtctttgcagatatagtcaagatgaggtcacattggattagggtgggccccaaatccaatgactggcatccttaggagaagagagagttttggtaatagacacaaatgcagtgggaagaagaccaggggacaagaggcaagttggagtgatgcagccggaagggaagggacaccaaggatctccggccaccagcagaagccagcagagaggcatgggacaggttccccacaagccttagaaggaagcatggccctgacttcagaattccagactccagaactggaagaataaatgtctgttgttttaaaaaaaaaaaaaaaaaa

SEQ ID NO: 91 - DNA, 794 bp, Rattus norvegicus
agcacccacctagacttgggtatcagctacaccaacaggtctcccccgacaggagccgaatcccggagttatgtctgaagagcaagaacccaagacttctgaagcagaatacggtacaatggactttcctgaattcgaaaatgaagaagaatggcttttcaaagttctgggaatcaagcctaggccttcctctgatctggatgacgctgataagcaggaagatgagccactgggccacaccgaatttcttcgcctgcaagatattcttcaagaggacaaagtcagcagtaccaatgatagcgacacttgccaagctgggtataccgaagaaaatgatgaggccagccacagtgacagcgacattgacgataatgtgaacgtcatcattggtgacattaaagcaaactcctccatgtatatggagatgttcactaatatgaactcacaagctgaccaagacctgaaactaactgaatcagacaatgccatgtacccaactgattaaacaagcaaggatctgaaacgtgtcaccatcatcatccttattggcctcatgcattacaaattaaatggtgatgggaaataaaaccttgtttttaaagaaaatgacatcatctttacacaccaacctaaaagcaaatttataccaaactgctacaacaaatggagagtacttaatttgagacctgactgttttgaacgttggaaatcctaacattctaaggtcatctacaagccaactagtggaatttgttgcttttggaaggttgaataaaatctgcttgaaaccttta

SEQ ID NO: 92 - DNA, 1184 bp, Rattus norvegicus
ctcggcctctaagctcccggagtcgctgcgtccgcgcagtccggaactcgtgtggccaccgcgggaacagagagggtccgttgtaacctgttgagtaactatggaggactatatcaaaatagagaaaatcggagaagggacttatggtgtggtatataaaggtagacacaggactactggccagatcgtggccatgaagaaaatcagacttgaaagcgaggaagaaggagtgcccagtacggcaatccgggaaatctctctgttaaaagaacttcgacatccaaatatagtcagcctgcaggatgtactcatgcaggactccaggctgtatctcatcttcgagttcctgtccatggatctcaagaagtacctggactctatccctcctggccagttcatggattcttcgctcgttaagagttacttgtaccaaatcctccaggggattgtgttttgtcactcccgacgagttcttcacagagacttgaaacctcaaaatctattgattgatgacaaaggaacaatcaaactggcagatttcggccttgccagagcgtttggaataccgataagagtgtacacacacgaggtagtgacgctgtggtaccggtcgccagaggtgttgctgggctcggctcgctactccaccccggttgacatctggagcatagggaccatatttgcagagctggcgaccaagaagccgcttttccacggcgactcagagattgaccagctcttcaggatcttcagagctctgggcacccctaacaacgaagtgtggccagaagtagagtccctgcaggactacaagaacactttccccaagtggaagccggggagcctcgcgtcccacgtcaagaacctggatgaaaacggcttggacttgctctcgaaaatgctggtctatgatccagccaaacgaatctctggaaaaatggcccttaagcacccatactttgacgacttggacaatcagatcaagaagatgtaaccctctggaagtcccgccctgctgtggcagggaagatcgtggcgtttactgttggctcttcctgtcttgtatagttttcttttctttgtctgtaaaccatcatctggacttttcctattttcctacgtataacttaattaacatgtaaatattattccatatgaatttaaatataattctgtatatgtgt

SEQ ID NO: 93 - DNA, 12460 bp, Rattus norvegicus
gggtcaggactgcacctgatctcatcatcagaggacttggtggaggagagcttataggtttggctgctgggaggctgctttgcctggacttggaaggtaatccctgaggttctctacactgtgatggtgactgggatgctcctggctttctttctgatagtctgactttttctgcccagggctgagatgcttatctgacatggctttactttaactggtatcaatattcatatctctctctctctctctctctctctctctctctctctctctctctctctctctctctctctctctctctctctctctctctctctctctctctctctctctctctctctctctctctctctctctctctctctctctctctctctctctctctctctctctctctctctctctctctctctctctctctctctctctctctcatagattgaacataggtcctggctctgctaagcaagtgcttcactgtcctagttttacaagttttgagacatggctttgccaagttgccccggctgaagtatggggaagactttctttgggggtctctgtgtggacagatggaaacccacatactttgatgaatactttcctgtcacttattttctctctggttaacttagagcatagggttagagatgcatactgaaaatcgcacttacacaaggctgcggagatgactcagcaggaaaagcccttgtcgcccaagtgtgaggattagaattcgaatctccaggacccatgtaaagtcaaatgtggcagtgcacatctgtaaccccagaacccccagtgagatgagggggagatcctgcctcagacaaggtgcatggtgaggactgatacctgaggttgccctctgacctccacacacttctagtaggacatcctaaacctcacaggagcacaagtacacactcatgccaaagacaagagggaacaaccagtcccccttgcagtagataactgtccaattacatgctccctgctaattttgggaaaggagcaactcctttatttcccatctccgcaagacattcttcctgcctcctccccccattcatagccaaactaccttacgagtgaaagtgtataaaagtcttagaaagatgcacacgcgaagtcacccctgcttaagtctaaacctagaccccccatctcagagcgcatcaccttagtctttacggggatggtttgattttcctgtaggcttcgagaggcatggactcctacgtgattcagacggatgtcgacgacagcttgtcctcagttctggatgtgcatgtcaatattggtgggagaaactcggtacaaggaagaaagaaaggcaggaaggccagatgggacgtgagaccctctgacatgtccaataagaccttcaatcccatccgagccatcgtggacaacatgaaggtgcagcccaatccgaacaagaccgtgatttctctgtcaattggtgagtttgggccccttgatggaaggctggtattgcctgccacctcctgccctcttgggctgactggaagagacgagaggaggtgagacccgaacgtggggatgtaaactcttggtggaccttttgcttttctcttccatggacaggggaccctactgtgtttgggaacctgcctacagaccctgaagttacccaagccatgaaagatgcmctggactcggggaagtacaatggctatgccccgtccatcggtaagcttgcccagagatgagtgccttctgggcactgctgtagaacacagtctgatctcaaactagcggtcctcctgcctcaacctttcaagagctgggattataggcatgtgcctgagttttaatgtgtgtgttttttttaaagttaaatgtatttatttgtgtgtgagtgtacgtgagagacaaacacagagagaaacagagagagagagagagagagagagagagagagagagagagagagagagagagaatcaggcagacaaacggacagcagacagacagacataggtgggggaagaaagagtgcatgatgtgtagccacagtatatgtgtgtggcagttaaagggcaactgtctgtggggactggctttctcttcccatcgtgtgtgagggctgagccttggcagcaaacacctttacccaccgggccacttcacttgctctcttttaagctttttaaataaggttccaaccgataataattgttgatttcctgatttgtggttctgaagaagagcccaagatagaacagccctttagattagggaaagggtcctattctggattctatttttcttttttaagatttatttcatgtatgtgggtacactgtagctgtcttcagacacaccagaagaaggcattggatgcccattacagacggttgtgagccaccatgcggtagagcaatcagtgctcttaacagctgaaccatctcttcagccctcactctggattcttttttttttttttctttttttttttttttctttttttcggagctggggaccgaacccagggccttgcgcttcctaggcaagcgctctaccgctaagctaaatccccaacccctctcactctggattcttaaactcagccactgtggtctgaaaaaatttttttttcctgacttcatctgctgtccaacacctcctccttaggtgctcacacagagctatccctcaaacagttctgcccatctttacctcgagggctagtctggctgcactcagtcctctaggcttgacatttatacattcgcctcctgtaattagctccttcatttccttatgtttcaaagctctgtttttattctggccttgaagtgtattgataacgccttcagagggaatgtagcaaggagtggctgatacatcgaaggcagaagttattcctgagagcaagatacttccctatttagcaaaattccgtctgtcaaaatgtctctcctaaagattttggcaaaataattccctggctttgttatcatgttgtttatctccccctgggtattgtacacattgatccattcttattgcagtattaattaaaataaaacaacaacagcccagtttcatgctaacatcagattcaaaagcttttccaagaggggtcagagaggcatggctttcaggtagattatattacgtatcagaaaattacttacatattagaaagttgcatacaatgacaatcaaattcaagactcaaaattaggtaataaaatattgtcatgaggaccagtaagatgccttactgggtaaaatgctttctgccaagcctggtgatctgagttcaattcctgggacccccatagtggagggagagaactgactccccaaagttgtcctccagccaccacaggtgcacgcccacacaagacccaagtaaataatttcattatccaaagtattaggaaactaatcgagcttggaaactggaatcaaacccttatctgacaagggttcaaagggtctgagcatggcccataaaggagggaaggtgatgtcatctctccggaatcccttcttcctcattaataaagtaggaaatgttgatcactttgctttaaagacccgttagtaaactgttgatggcatttcaaaaagtagataacaggatttaaggtgtaatttaagtccttatttaaagcagaataaaatgtaattatagcattcacgatttgctgggtatttctgcttctggttgttgtcatacatttgcacttttaatagagcaggaataggaaatgaattcccctcacacacgactgaactgtacagaatggactaaccctaagcaagggcagagggtggctggcaggaagctgtgtcaaagctcggggcacggctgtcaatcaagggatgaaaacccccagcttcctctctcctgtcttgtctcaggctacctatccagtcgggaggaggtcgcttcttactaccactgtcatgaggctcctctggaagctaaggtgagcgagagtaccacctcagaggccgctgagggcaagcacactccttgttcctgtcccacagggggtgatggtttggggggagctgaggaaaatcactgtgtagcaagttgtagtaagttgagcacttcttacacagttggggtcattgatcagtaattatgattaatttcactatggtataaaaggtgtctcctgtggagcgcttacctaggaagcacaaggccctgggttcggtccccagctccgaaaaaaaagaaccaaaaaaaaaaaaaaaaaaaggtgtctcctggcacagatatactattgtcctagagtctcaaaggatccccaaggccatcctagacttgattttcttcaaaagatcattgggaaactcttcacaaatagtaaattatttatttgaaagaatttctcattaggaagtgtttatgtatgtgtctgccttcactcatgttagggcgctgggacagaacattagcagtggattggtggcagggccagccttggatgctgcctttccttcttgttgtctaccttatgatctaagaggtgcctctcatctgtgttcagagaagagtcaggctacctacctctggtcaaaagtaaataaataacctggtggaaaagagtccaaggtcaatcgaagatgtcccttgagagttagctgagtcatagccagcttgtcctttttaaagtgattggcttaatttttttaaagtggccaccatttccaacaacatttagaggaagctgagagatggttagaagagagatagacacacatagatggtagatagacagaagagaaatgataaatgctagatagatggtgggtggtaaataaacagataatagatgatcgggacatgatagacaagatagatgagagatagatacacgataaatagattgatgatggatgatagataaataagtagatgatagatagatagatagatagatagatagatagatagatagataggcagatagacagacaagatagatttggttgggctcatcacaatccttcctatttctttgggacttattaaaataagttccttaatacttccagctcacacacatgatgagctttctcccaagcccaccctttcctctcttcacaggatgtcattctgacaagcggctgcagtcaggccattgagctatgtctagctgtgttggccaatcctggacaaaacatcctcattccaaggcccgggttttccctctataggactttggctgagtctatgggaattgaggtcaagctctacaatctcctggtaattaaaaacaccttttaatgcttattttatcgaacatgtacgggtatctttgtctgcatacaacatatgtgcctgccagatgaggatttttaaggtccctggaactggagttatagatggtcgtgagccatcgtgtggatgctgggaattgaacctagatcctttgcaagaacagcaagtactcttaccccctgagccattactccaggccttaatttttgactcaagtgctcagttactaacctgtaaaaaaggaaatggtcattgtgatacagagactggtctgcagatgggaggttggagtcaaaggcagatttattcttttaaaaactttttatattcctctattttctgtgtacacttgtgcatgtggttggggcagtgagtttagtgtgtgtatacagtggcccgtgtgtggaggtccaagacaaatttctgcaatcagttctctcctcccaccatgtggctgtcagggctggaactcagatcaccaggcttggtgggctcttattttgttctttacactgaattcttggcctgaatattccctccaaattattcagaaacatcttagtctcctgtttttctttctcagcccgagaagtcttgggaaattgacctaaaacaactggaatctctgatcgatgaaaaaacagcgtgtcttgttgtcaacaacccatccaatccctgtggctccgtgttcagtaagcgacaccttcagaagattttggcaggtgagtgagtgccaaggacacccaccctggggggggggaggtgagaacagcatcctttagctgctcagtgacagaatgtcctaggtctggaatagaggtggagaaaggccaggctgccaggccagcactgcctctagcccatgatgtgtcctggggtcctagggtttgcctaaaagaagggagaaatgagaaatacatccttaacccaaaactggcaagcctttcattttggcggattttgtgtttcagtttagaactcttcaaatggcaaatccgtgtaaatatcctcaaatccctccttttaagaccacaaacaagcaagcaaacacccccacccccacccccaacaaagcgtactgataaaatactcaagtccaaaacaccccgatgcagtggttgagaactaggtcacccgtgtttgcctttccccactcccatctgtggaagagagtttggaatgtgtggttaaatggcacagctaggctagacatccggggagaacatcgggcgtgcttagttcccagtagcacttagttccgtgagtacggaacgcgggacccagagggctcggcatgaaggaagcgatgacggaaaccgaactgaaaatgattccagcattgtttttgttctttccagtggctgaaaggcagtgtgtccccatcttagctgacgagatctatggtgacatggtaagtctgggttgggttatatcattacaggagtctcaatagtacattgtcctctgggtcgaggcgagttgccttaatggaatggccagaagtatctggctgttctgtgcagatgttctcgacaatacacagcttagcttttcatgaattaagttatttaattcgaagatctggggaaaagcaaaagttcttgggatttccttgaatgtactcgccaaggagataggatataaaggtggatttcttgtttatgacacttacggatgtgtattttgagtatcattggggagaggggtcttgaaaacatagctcagtggttgagtacacagccaactagggtgctcaaatctaattctaattcctggcatcagaaattaaaagaaaaagtgcacaggcagaggaagaacagttgataatcattctagacttctttgggaatccataatgtactgtgaaccttctagtctctccaaaagtctgcattctgcaacatggctgggcccagggatgttagacattggattatcgacccctccttttattcttaaatcaataactccacctattgaagttccatagtgcaagcttccagaagttgtacacaccattggactagcgtccttgccctcatgtcaggcttccattattccagaccacacactaaagtaaatcctttggataagtttccctgaactgtgtggggtccagcccgtcatcatctaaaaaaagggataggaggaaggcagggacccagaggaaagcattcaaggacacctctcttcctcaggtgttttcagattgcaaatacgaaccactggccaacctcagcaccaatgttcccatcctgtcctgtggtgggctggccaagcgctggctggtccttggctggaggttgggctggatcctcattcatgatcgaagagacatttttggcaatgaggtgagagcaacatggtaggatggtatgaataatttagtatatgtattcggttttgaatactcagtgttgcggagggagggtctccccctgcccccgactgtgttgtttgcagtgtctgggaatatgacggatgaagatatagatagatattcctcagccaaacctacttttctcatgtttgggtctctgggtctgtgaagacggtccacctgcctccaattttgaggctatacaaaggcaaacaaccacagtaatgatggcactattattcatgttttgtgaacctataacaccctatgagaaaattttacagtcaagggtgcagagaagttacatcatctgcctacagtcacacacaggtttgtgacagagaaggacctaagagggtcaccaggcaccatcttccctgaggttgaaagctcgatagagaggttagaatagagccacacagcacaaggatgcttatgaaaggctaaataatttgtctcctggggggttctagattcgagacgggctggtgaaactgagtcagcggatcctgggaccatgcaccatagtccagggtgctctgaagagcatccttcagcgaacccctcaggagttctatcacgacacgttaagcttcctcaaggtaaggggcggttggtagccttccactcgagggctttgggagccagagaaggtatcagcagaattaggaatggtggccccttatctcttcagccctgtgccaccggggctttcaaatcagaaggcgacgtcataggcagctccctccacttcttgtaattcgctccgtcctgctaagaacttccaagggatggggttttgttcttgttggctctttgtgctctaacactaagtctgggtttgtggccttcaatgaaggttctagcttcaatcatgtttttgtttcttttaaaaaattgctttattacataaaactctatttatgaaagccaagtttttctttcacttaaaatttgatccttgatttgtttgtttgtttgtttccctctgcctcttcttttagtccaatgcggacctctgctatggggcactggctgccatccctggactccagccggtccgcccttctggagccatgtaccttatggtaagcgtgcgtgcatgcatgcgtacgtatgtatgtatgtatgtatgtatgtatgtatgtatgtatgtatgtatagatgtgataaagcacaggagatggcttgtcaggatcgtcatgggtggtcgtgcagggtctgcctccatccacaagaatgagttaggctctggtccccatcactggagaaactgtcttgttatgaattgtcccagtacctccattgacccgtattctccacagcctcttaataacctcagctcagtcattcctgtcgtgggcagatacagaggcatgctttgtggtttgtgactaacagacatgtggttcttcggaggtcagggaccacatagggatttttgtctgtctgcagtatcactagtgccccttgtggccctgggatgctaactgtcctgcaatgagtgggatagaccccacgaagtgagaagtcctggtgcctcttttgcaaaaatagagagatggcattcttctccctgttttccctaactaacatccgggaaggagcccttcaataaaccaaaatatggatataaccatgtcttcttggttttctcagttatgggcggcagagttctcagatggtctcggggactccctgcccccatttctggcacaggaaactgatcggtattgctccagtgacaccctggccttctctttttattgtgggttcaggtgggaattgagatggagcatttcccggaattcgagaacgacgtggagttcacagagcggttgattgcggagcaggctgtccactgtctcccagcaacggtgagtgcgggtgtgggtatctgcggacattcccagcagcccctgcaaaccgcagaggtcttcctgagatgtgttttagcccgacgttttctcccataccaagcatcctccttcatcactattcgccccctctcctcccccctcctccccacatccccccaccccccctccaaaaaaaggaagaaaagttggaagcacagtgggccggaggaaagttgtcgattgtcgatttcaagatgaatgaactcagttatcaactcagttccctccagcggagtgaaaggacgtcccttagtggaatagcattactgtcttgctcactagtgcctggccagtttaaggtgatccggtttggttgccctggagataactggccattgtttttgcagtgcttcgagtacccaaatttcttccgagtggtcatcacagtccccgaggtgatgatgctggaggcttgtagccggatccaggagttctgtgaacagcactaccactgtgctgaaggcagccaggaggagtgtgacaaataagccctcacccgtcctcctgaagacatgtcccacgcaaggacggttggactggaccgctcctcctcagggagccaaatgtctctgatgggagaggaacctctaaagcaccgcatgaagacttgaagatcatttctccttcccccagtttcacccaacgcacgcctggaaacccagacccctccctactcagttctgctggagccatgagctcactgccccccaccccccacttccttatcctgagggtatcagaccaatttaccagaaagaagctgggccaagaaaagagagagctcaggatgagagaagcagaagacggaggatgcctctcccacccatttcctcgtgctgacatcctcttcagtcaggtcggaagtcacctcagttgctgcctcacttcaggcaaacctcactcctcgtggtacagctacaccagagagaagtcgaggacttgtgaattcagttaattgtattctaaacacatcaggaaacttgatgtttaaaggatccctgacagaatttttatttttattttttgtaaaggattattttgcggtgcaaataaataccagcttcctaaactgatcaacttcctaactgattagatagatctacttgtatcaggttttcctaaaataggaggacacctcactgaaggagaaagaagggaccggagcctctctagagactttgctgtgtacaggacagcatcttcctccttgtcttctcgtagaatcatatatagccacttttgctatcatgtgaatattgatttattgatatttgtaatattaacttttcatatattttctaagaaacatttatattataaggccttttattttgtcaagggcataaattattttttctttatttttgaaataaaaatttatcaaatatgcttctctgtgatgtgttctctggggcggggttaggtccagtcttttacccacgaggtctctgcattagttacttcttctcattggtgtaacagagcacctgacatgaggaagggttcattctggttcacagtttcagggcgtgcagtccatcatggaagggaggcacagagagggatgcttgccatgctcagctcaatgtctcctttttattcattccaggccccagcccatggcatggtgctgcctacagttagggtggatgttttcacctcagttcacactctataaaatccctcatagccatacgcttctctcctgggttattctagaccgcgttaaccacgaataccaaccatcctggtctcatttctttctttgtaggtgtactgattttagaaggtcctatgaaatatgtgtatgtttatatgtgtatgcatatgtgtatgtttatacgtgcgtatatgtacgtgctacaagctgctgcctttcttccccggcattgtctggttgttgacaactcactgtctcagagagaaggcagggcaaagtctcaaatgaggagtccatagcctgtgtttcctttagacacagatgtgtgtcagaatagaatgggaacagtgggatctgggacaaacgctgtggttcctaatctccctctgggagaggaagtcaggtgtccttggttcacccttccccttgggtcttctcgcatgcctgggagaaagggtgagggtacagcctggaatgagtgggacctggtcttactgggaacaagtgctgcttaccacaggggctggagaagagaaaaaccttcaggaggctcttttaggtgaaggccttccctgtggcaatttttaacaaagcagctctctgagatgaaacttgcttattcgtattgctttactgggggtgggggtggaccctttattcaggtgaaccagggattaaatacctcttgggtgaaaggcgtgagaagacccaggaaaggaaggtcattggcaagaggctcaaggctctctagatacctcattaacatggttatgcccacgggtgtctctcagttgggtgtcatggttacacattcctgagatgggtggggaaaggctccactccccctggtctcaaatctctgagatccccagggtttgagctgactcacccttaccaattcttatgcctgtctggtagctgcatcgtcccatacaccctgaaagaccccagcttagcagcagtaacgccattttgcaaggctgtacttaagatgactggttcagggaaaggttagaacactgagtacacagcggctgccaagcaagatatgtttggttgaaggcctggcaacaggacgacttcggttgagcacctgacaatgaaaaaaagccccgggagaggtcccacaccctggtggggggccgagtcagtcgttatgttccaagaaggtagctaagaaacttcgccccgggctaaactcttggggggccgagtcagccatt

SEQ ID NO: 94 - DNA, 6253 bp, Rattus norvegicus; identical to SEQ ID NO: 83
  misc_feature (1)..(6253): where n may be a or g or c or t/u, unknown, or other

SEQ ID NO: 95 - DNA, 6730 bp, Mus musculus
  misc_feature (1)..(6730): where n may be a or g or c or t/u, unknown, or other
gcgattcagatctggtggacccgtgagccgtggagccgcggggagcttatgggcccggtcgcagcagagctggcagcggttcctggaggaaatagggccgagcaagccaggagcagaagggaaggaagcgcgggatcgctgatgtcagagcagcccggaaagtcgtgctggagaaaactgaagacacccggctttgagccgccccggaggaccctgcgggaccccacgccccttcacaaccgggtccctgcgcacaagcgactgggacgaagacgcgaggaaccattcgggggccacccaggaatacaggcaagcggccggcgcgggccgaggattttaatgatcctgggttacatgtggaactggctgccagtgtgactcccgtcaggcaggactgggcgcacgctgccctgggcaaccgccagttgagcggacgaagaggggacgcagggacagacagacactgccgagctggaaccatgtgagagctgatcttgaaaagtggactaatacatagaggagctgtcccccagcctcacccctgtagggatggagcagaggaggttctatctgcgggccatgcaggctgacaacctgtctgtggttctgctctcagtggcctggctcctgctagctcgtgggaccacaggtatgcctcagtacagcactttccactctgagaatcgtgactggactttcaaccatttgactgtacaccgaagaacaggggctgtgtatgtgggggctatcaatcgtgtctacaagttgactggcaacctcaccatccaggtggctcacaagacagggccagaagaggacaacaaggcttgctacccacccctcattgtacagccctgcagtgaagtgcttacactcaccaacaatgtcaacaaactactgatcattgactactctgagaatcgcctgctggcctgcggaagcctctaccagggtgtttgcaagctcctgcgactagatgacctcttcatcctggtggagccatcccacaagaaggaacactacttgtccagtgtcaataagacaggcaccatgtatggtgtgattgtgcgctctgagggggaagatggcaagctttttatcggcactgctgtggatggcaagcaggattacttccctactctgtccagccgcaagctgccccgtgaccctgagtcttcagcaatgctggactatgagctccacagtgattttgtctcctccctcatcaagattccctctgacaccctagccctggtctctcacttcgacatcttctacatctatggctttgccagtggggggtttgtctactttctcactgtccagccagagacccctgacggcatggccatcaattcagctggagacctcttctatacctcaagaattgtgcgtctctgcaaggatgaccccaagttccactcctatgtgtccctgccttttggctgcacacgtgctggggtggaatatcgccttctgcaggcagcttaccttgcaaagccaggggaagctctagctcaggccttcaacatcagcagcgacgaagatgtcctgtttgccatcttttccaaggggcagaagcagtaccaccacccccctgatgactctgccctctgtgccttccccatccgggccatcaacttgcaaatcaaggagcggttgcagtcctgctaccacggagagggcaacttggagctcaactggctgctgggaaaggatgtgcagtgcaccaaggcgcctgtcccaatcgatgataacttctgcggcctggacatcaaccagcctctgggaggctccactcctgtggagggactgaccctgtataccaccagcagggaccgcctgacctctgtggcctcctatgtttacaatggctacagtgtggtttttgtggggactaagagtggcaagctgaagaagattcgagctgatggtcccccccatggtggggtccagtatgagatggtctctgtgttcaaagatgggagcccaatcctccgggacatggccttctccatcaatcagctatacctatatgtcatgtctgagagacaggtcaccagggtccctgttgaatcatgtgaacagtatacaacttgtggagagtgtctaagctcaggggatcctcactgtggctggtgtgccctgcacaacatgtgctcccgaagagacaaatgccaacgggcctgggaagcaaatcgatttgctgccagtatcagccagtgcatgagccttgaggtacaccccaacagcatctctgtgtcagatcacagccggctgctcagcctggttgtgaatgatgctcccaacctctctgaaggtattgcttgtgcctttgggaatctgactgaggtggagggacaggtatctgggagtcaagtcatctgcatctcacctggacccaaggatgtccctgtcatccctctggatcaagactggtttggcctagagctgcagctgagatccaaagagacaggaaagatctttgtcagcaccgaattcaagttctataactgcagtgcccaccaactgtgcctgtcctgtgttaacagcgccttccgctgccattggtgcaagtaccgtaacctctgcacacatgaccccactacctgttccttccaggaaggcaggatcaatgtttcagaggactgtccccagctcgtgcccacggaggagattctgatcccagttggggaagtaaaaccaatcacccttaaggcccgaaacctgccccagccccagtctggccagcgaggctacgagtgtgtgctcagcattcaaggggctgtccaccgggtccctgccctgcgtttcaacagttccagtgtgcagtgccaaaacagctcgtaccagtatgatgggatggacatcagcaacctagcagtggactttgctgtagtatggaatggcaacttcattattgacaaccctcaggacctgaaagtacatctctacaagtgtgcagcccagcgggaaagctgtggtctctgcctcaaggctgaccacaagttcgagtgtggctggtgcagtggtgagcgcagatgtaccctccaccagcactgccccagcacttctagcccctggcttgactggtccagccacaatgtcaagtgttccaacccccaaatcacagagattttgacagtatcaggaccacctgaaggagggactcgtgtgaccatccatggcgtgaacctgggcttggacttctctgagattgctcaccatgtgcaggtggctggagtgccctgcacacctatcccaggggaatacatcatcgctgagcagatcgtctgtgagatgggccatgccgttataggtaccacatctgggcctgtgcgcctgtgcattggggaatgcaagccagagttcatgaccaagtcccaccagcagtatacttttgtgaatccttctgtgctgtcactcagcccgatccggggaccagagtcaggaggtaccatggtgaccatcacaggccattaccttggtgctgggagcagtgtggcagtgtacctgggcaatcagacctgtgaattctatgggaggtcaatgaatgagattgtatgtgtttcacccccatcatccaatggactaggaccagtccctgtctccgtgagtgtcgacagagcccgggtggatagcagtctgcagttcgagtatatagatgacccacgggtccaacgtattgagccagagtggagtatcactagtgggcacacacccctaaccatcacaggcttcaacttggatgtcattcaggagcccagggtccgagtcaaatttaatggcaaagaatctgtcaatgtatgcacagtggtaaacacaaccaccctcacctgtctggcaccctctctgaccagtgactaccgcccaggtctggacactgtggaacggccagatgagtttggatttctctttaacaatgttcaatccttactcatctataacgacaccaagttcatctactaccccaacccaacgtttgaactgctcagccccactggaatcttggatcagaagccaggctcacccatcatcctgaagggcaaaaatctctgtcctcctgcctctggaggggccaaactcaactacacagtaatgattggagagacaccttgtacagtcactgtgtctgagacacagctgctttgtgaacctcccaacctcacagggcagcacaaggtcatggttcacgtgggcgggatggtgttctcacctggctccgtgagcgtcatctccgacagcctgttgaccctgccagccatcatcagcatcgcagctggtggaagcctccttcttatcatcgtcatcattgtcctcatcgcttacaagcgcaagtctagggaaaatgacctcacactcaagcggctccaaatgcaaatggacaacctggagtccagggtggcactggagtgcaaggaagcttttgcggagcttcagacagacatcaatgagctaaccagtgacttggatcgatcaggaatcccttacctggactaccgtacctatgccatgagagtcctgttcccaggcattgaggaccaccctgttctgcgggaactggaggtacagggaaatggacagcagcacgtggagaaagccctgaaactcttcgcccagcttatcaacaacaaggtgttcttgctgaccttcatccgtacactggaactacagcgcagcttctccatgcgagaccgtgggaacgtggcctctctcatcatgacaggccttcagggtcgcctagaatatgccactgatgtcctcaagcagctgctctctgacctcattgacaagaacctggagaacaagaaccaccccaagctgcttctccgcaggactgagtctgtggccgagaagatgctgactaactggtttgcttttcttctacacaagttcctgaaggagtgtgctggggaaccactcttcatgctatactgtgcaatcaagcagcagatggaaaaaggccccattgacgctattactggtgaggcccgatactccctgagtgaagacaagctcatccggcagcagatcgagtataagactctgatcctgaactgtgtcaaccctgacaatgagaacagcccagagatcccagtgaaagtactaaactgtgacaccatcactcaagtcaaggagaagatcctcgatgccgtatataagaatgtcccctactcccagcggccaagggctgtggacatggatctggagtggcgccaaggccggattgccagagtggtgttgcaggacgaagacattaccaccaaaatagagggtgactggaagcggcttaacacactgatgcattaccaggtgtcagacagatccgtggtggctctggttcctaagcagacctcctcctacaacatccctgcctctgccagcatctctcggacatccattagcagatatgactcttccttcaggtacacaggcagcccagacagcctccggtcccgggtccccatgatcaccccagacttggagagcggtgtcaaggtttggcatctggtgaagaatcatgaccatggtgaccagaaggagggtgaccggggcagcaaaatggtgtctgagatctacttgacccggcttctagccaccaagggcaccctgcagaaatttgtggacgacttgtttgagaccttgttcagcactgtgcaccggggtagtgctctccccctagccatcaagtacatgtttgatttcctggatgagcaggcagacagacacagtatccacgacacagatgtgcggcacacctggaaaagcaactgccttccacttcgtttctgggtgaatgtcatcaagaaccctcaatttgtatttgacatccacaagggcagcatcacagatgcctgcctctctgtggtagcccagacctttatggactcctgttccacatcagagcaccgactaggcaaggactcaccttccaacaagctgctctatgccaaggatatccccagttataagaactgggtagaaagatactatgcagatattgccaagctcccagccattagtgaccaagatatgaatgcctacctcgcggagcagtcccgcctgcatgctacagagttcaatatgctgagcgccctcaacgagatctactcatatgtcagcaagtacagtgaggagctcatcggggcactagagcaggatgaacaggcccgacggcaacgactggcctacaaggtggagcatctcatcaacgccatgtccatagagagctgaaaggaagacatcttgttcttggaagagagactcatataagctatcacactggcttctcaaaaggaaagatgggatgagtgaagggtatcagaccccagagctggctatcctctgaaacctcactgacggaagaaggaaaggctcctctgtcaatggcagccatgtttcatcacagccggttccttccagaaggacagtgaacaccacccatcacagtgtgagctcaggacacaacgggcaaggagaaggtggccctttaagctgagaggcttgagccagatggttctgcctctgtgactgctgctttgcatgaaaattcatttgatgtatattgggaaataatgagaactttatttaattttttaagaaaaagggaaaaaaacagaaataaaacagaaacataaatcctccctgtcaaaaaagcggccgcgnattcgatatcaagcttatcgataccgtcgacctcgagggggggcccntacccaattcgccctat

SEQ ID NO: 96 - DNA, 110079 bp, Mus musculus
  misc_feature (1)..(110079): where n may be a or g or c or t/u, unknown, or other
tgttctggcaactctcaaaacatgaaaaggtagaagacagacaagggacttgaatgtgaccatttcaaagaagccaaagtgttttgggtttagtcatagtcataatcctcctgttcctttttctgcatattttcttcattgatgctgtctgatgattttgtttagcattttctgttgtgctattagcctacagtttaaaaggatcttaaaaaaataacccaacattcacactaagtctgcagttgtgatggtttgtatatccttggaccagggagtggcaccatttggaggtgtggccttgttggagtaggtgtgtcacttgtgggtatgggcataagatcctcaccctagttgcctggaagtcagtcttccactagcagcctttggatgaagacatagaactctcagctcctcctgcgccatgcctgcctagatactgccatgctcccaccttgatgataatggactgaacctctgaacctgtaagccagccccaattaaatgttgatttttataagacttgccttggtcatggtgtctgttcacagcagtaaaaccctatgacagaagttggtaccagggactggggtattgctgtcataggcctgaccatgcttttatttgaaagaatgtggattttgggactttgtatttggaaagcagtggaatgctttaaatggggcttaatgggtcatcctagtaggaatatggaagactttgttgctgggagtgatttgaactgtgttgacctggcccaagagatttcaaaggagaagaattccagaatgtggcataaagactggttttgtggtattttggtgaagaatgtgtctgttttttgcccttgtctgaaaagtctgcctgaggctaaggtgaagagactcagattaatttcattgacaaaggaagtttcagaaaagcccagcatagactttgttctctggttaagtcttatgaagagaagtttgaacaagcatagcaagcttagaaaggaaaaatataatatatatggttcgagtaccaggaagtgaaatggagcaaaatcttgtgttctaggagataacagattaagggagtgggaccttggggcaagatcctacccagctaaatttagatccaggcatggtgatacacacctttaatctcaggagacaggcatgctgatctttgcatttaaggtcaatctacagagcaagattcagaacagccaatcttaggtagtgaaggagttggagaacagaaagctggtgataatgtaatagtacaagggggccatgttccagctcctgcaagcagcagaactctgcagtttcagccatgtggctctgggtttagagtgaataatagaagggactacttggacaattgatgctggttagctggagctaagaaattagctgtgattaagaagagaccagcatcactgaggtgaaatcttctgggagcacaaagttgtgttccagagatagccaaggttgtacctcgtgctgcagctggatttggtaatgtgtaagagtcacccaggtgatacttgttttgaagtcatgaaggtgtcatgaagaacagctgaggcttggcactgtgagaggtcatggaaggccattggagaaggtgtagcctcaactgtagttgatggcccaggactgaaggggtcatgcaaaggatttgatgcttggcaccctgaagagagcctatgagaggctattggtgaagcctagttggaatggaacaccccagtgtattggagatgtcagtaccatgatcaccaagaacagccgccatagtggagtggatcaacctgagcttagcgtgctacagagggcagagctggagaagtgatgccagcccttaggaggagtccaaaagatcaagtggaatcccagacactgaaacaagaagctgtaacattgaaattgccttggagactcaaagatgttaaagatgccagagccatgggatacatgctgagaaaagctgctaacagggagtggaaccagcccaggagaaagcaatggttgcagtcaacaaagatgaaaaaggagtggaaatctgaagacggcttggacatcagccatggagatgcagagtttggagtttgcccaggtggtttcctgtctttctttggggattacagttaagtgattggatgaatctcagaagagatcttgaactttggacttttatcattgttgagactgctatagactatgaagactttgtttgtattttgcattatgctatgtttaagtatggccccccatagactcatgtgtttgaacaagtctatgggggccagggagtggaatgtgatggtttgtatattcttggaccagggagtgacaccatttggaggtgtggccttgttggaattggtgtgacctgtttggaatgggtgtgtcactgtgggtgtgggcttaagatcctcatcctagttgcctggaagtcagtcttccactagcagcctttgcatgaagacatagaactctcagctctgcctgtgccatgcctgcctggatactaccatgcaccttgatgataattgactgaacctctgaccctgtaagccagccccaattaaatgttgtttttataagacttgccttggtaatggtgtctgttcacagcagtaaaaccctaactaagacagcagtctaatatgaatatgttgattaggagtttttactcactaaaagccaacaagcaaatccacaggaaatagatttttccaatttgaatctaatgaaatcatttgttcagaatatatatacatgaggtcctactgaagtcacctttcacacggacttcattgagatgccaggtataaaccttacataggacagtgtatgcaatacctcttttgagttattaccattttcctggtgtttcatgacctagaacacagctataggtcattttggaatgaggtttgtgtcaattcaagcatctccatgttgtgatgctgtatcattctctctcctggggacctggataccactttagtcatagatacaggtcaaaaactaaggtaggggctgaaacaaagcagaatataggttggtttgttagggtagcagcccttattcttttcatgctaccccatttccgttctgcagatgagtgttgtccttgtattctgtgtacccataattcagccacgatgctgtctcttctgtcagctatgtctagtctgaacttgtggatctggttgctcagtgttgttcattgttgcctctgactgttcctttgctactgctgctgttgagaagaatcagagtgggagggggaggggactatactcaggatcatacagtgttaaattgactctgtagaggaagcattcccaactgcccaaggtgtttgcatattctcaacaacaaatggcccacctattcaggacagccatatcagcaaatatctaaggtgggagttgtagcaaccagacagtcagcttgtgcctgtagctggctgcatgtgactttatattgctttctttctccgtagcatcaatgtaatactgtaccaagccttaattgaccccgacctttactagagcttacagaagcaactgtatcatcttgggtcatccaagaagacacagaagttagtagagcaaagtattttattagatccacttcacctggatataggagaagggaagcagggttggaagggtgggatacaacctgacagtcttgatcagtgagtcaggcaggagaaaacagctttctctaacatttgtactctgttgagtctcagtgtccatgtcacatccttctagtacctgaaacacagtgggccatgggggtcataatgatagactgactgactggctggctgactgactgacaggaacgtatgaatgatgggtactttggaaagcagaaagtgggtgtcagctgagaagcactaggatgcccccgtggctgccttcacacagcagattcatctttaaccctgtggtatgttgttccccacagtgcacttcctaggcgatgcttccactggccccttgtgcattagtctcctgtctggatggtaattacccccatccatggtaagtacttagagggcatcttgagatctgttggcaccggtgcgtacacaacctgattcaggagagcttgtcttccagcatgaagacacacagcagtgtgagatcagcaggctgcggggtcctgttagatgcccctgcaggtgcatactttgctgatagggctgctggatgtattgtccccttgatcattcaatgatgaaacgtgaacagagggagcaggagaaggacagggtggtggtgggtttaaggtgatgagggagggtggtcttgaagggctgcaaatgatgcttccagaaagctttaggagaaaggccctcctgcaggatgacatgccactaggcagtgttttcccatggtctttagcagtgcatttgctcacagtgccatctgctggcccattcctccaacttcactgggaactgaagatgaaaggtgatcagaagcaggggcggtaagcaagcaccttccatggtggaagttctgtcctgctgagggagcaggagtggaggtgaggatgttttgccttctgggcagataacttgggaggcttcttcacctttccctcaggttcttccctcttcctcctgggctcccaggtctctgatgagaagcccccatctttctaagtgttttaggcctatcgatatagaatcctttctctctgactacttctaaggcattcttcctttgttctcagacttttgatgttatttggctgtacatttatttggatttaatcttctgatcctgaaatgtgtcaactcgtgtctttttacaaaatttgtaactttcctcttcttgctccttgtagtgagtttagtgcttctgccctcagcttttggaaacactataccagagacactggaattttctccttagtttctcaggcctctgaggcgctgttctgttttatggtgcatgtgagcgctctttctctgtctgtgtctctgtgtctgtctgtctctgtctctgtctctgtctctgtctctgtctctgtctctgtctctctctctctgtgtgtgcctctttctgtctctctctctcagggtaaatcgctctgtgtggaatgactagtgttattaggcaagcctttgatttttaaggtactgccaaactgttttcaaagtggtccttgttctcaccacatgctttcccctggttccttgccatgctcactaatctctgctgcggatttacttacctttctgtgtatgtgtgctttgcctgcatgtatgtgtattcagcacatgcatgcagtgccctcagaggcaagaagagggtgtcagattccttgcaactgctcttccagactgttgtgagctgccaagtggctgctggggagcaaaacagagtcctttgcaagagcagcgagtactgtcaaccacggagccatgtgtctgaccacaagtttcagtgtctttagagagtttccttttttattgctcagtgaagtaatgttatgaaggttaattgacaggtgatggaaatgagcatcttcagtgtagacactgcaggtctttggatagtaagtgatttttacgttgaagtctgcacatgctcttattgtctgtctcagtgccttatttaaactgtgctgtagctggaatcctgtgacaccaccacatcagagggaagaggagaggcgctaatccccgagtgaatggagagtctccatcttcatctgccttgcttgatttccacaaatgcctcggtcacagggaaacttcatgtgatttctcatcaaggatggaacgtgggattctgagcaggactgcattgttgccttctggcctgggaaggtaagtgatgcctctttaccaccctctcccatgtagcctgatacaacatcatggaggattgttctcattcccactcggtcagataccagctgtctggtaaacttgacatcaattggatgggtaagggggcaaggagtgatggtctcaaacaggacaagagcctgatcatggttgacacagctctcctctgaagaccccagactgaagtgaccttctgaacactccgtgatcagagttcaggacattgtggatctctgagggttcttgtaaactgtgtttggaaaaggtgggaagtgaggcagtttgtaaagggcagtctagctgactggctgaggggcagccctgtatctctatctctgtgcaggagaacaaggcaacattgaaaagtgggggagctccgtgtgtgctctcccagggcattaattagcaaatgcttcattttacaaacctcatgtggcatgaggctaagaggctgtgggtagggaaagccagggtacaggaacaaatgacaatccagctgtgggaaccataggattccctactgccttgcatgagtaaggtgcatgtacagaccttaaagtacatcagccaggttctctgcaccactctgaggctgcatgacttggccagtcctggtggcctacctggtaccatgaaaaaccaaatcctgggtacaacatacatgctggcacccaacaaacatttagtgcctggctgcttgttcacagctcctggctgcagaaagacattcacccactcactgttcagtgtgggcttctggagctgggagcaaaaatgtgagcaggatcccagggttctgagatcctaaagggtctgtcttgagaggaggaagggtgaaagctggaagtccttggcagggagctccatagtttgctagatcctgccccagacatagactaaggggtaggcagcccaagatggcgaaggaagtaaaagatagagtgctagagattaggcagttagagctactgcatgcaattgtttaagggtatacactttgtgcctagctttgtaattacctgagtgtgtacatgcaatatacaccacacacacacacacacacacacacacacacacactgcaatttctgatcttattcacagggcagacagtagacctcaaacagccctttcagtgaacatcaagcccgtacaacatctctgatctgctcatgaggtcctcagatgtgtgcaccccacccatactttacagagagatcatcaatgtggcagagaatcgggccccaaacttaacttcatacagcattgctgccccacagctagtctcctcccctcccccaaggagtccaagaaccaccagcagcttctaaaggaaacagccccccccaacccctccaaacacaaaattggttgaaaagtggtggatttggggtttgtgtttgtttttttggggggtgtgtgtggcatgttttttttgttttttgtttttattagaaaggcattagctaaaaggaagtattccagctggctggaagaggtggctgaaaacattgtttgcacttccaggaggagctgatgtcatagccggcaggtggtctcaggctgcctctgggccaggagggatacctggctagtgtacacagcccttgttgttagggaagagtcgcagaggtgaatgcaccaaagatcaatacagctgtagcctcaaaagcaaccaagcaaccttcacaggtcctcagcaacagcctggcagccgagccacggggatattaaagccaaatggagggctatgggcttatgccacatgctggatattgcaaggggaagcagaaatcagtccctcccaccagcacatgctgtgcccttctaaggcatgccatctatgccaaggtgccctcagagggcagtggtcttgcgagactactctgagctgggctgagcagggcaggtcgccatggccagctgactctcttgacccatccccaggtcaggcagaaaacccacaggtggtcttctgaaggtcaaggcagttcctgtttctgagagaaacctgcacaggcccatcatgaacatgctagggccaggccacgtcctccacttgaggaagagaggaaagctcatagacacatactttctttattttcaatgtttattttacatgtgtgcatgcttctgtgtctgtggcttcgtgggtatatggcacgtgtgtactcgatccgttggagtcagcaagatggtgggtgattccctgaagcgggatgtacatctgttggctgtgacctgtctgatgtgggtgctgggaaccgaacccaggtcttctgcaagggcaggaagcacccaactcttgtgccatctcttcagttccagtgcaagtctcttatgactggacaagaggctttcccacgctaccgttttctgtatattatgcttccctctttcaaggaggtgtccagagcagtgagtgccaccaggaattagctggagagcctccattctcacttgctagtggagacacacatctctcagtatacctgggcataggcattctggaagatgagactctggtacactagtggttgctctccggggacatcactagagtgcagtgcctttactagatctccttacaggagtatgagtgacttcaagcagctgcaccattaaaagtcttaccccagctaagatggccacttctccaaagcttcaaagatagagtctctcctctcttcctcccccatgctccaacacctcctgagaccacaggcagctgggaagtgtgacaagggggagtgtctatagtgtgaggtgaggatcagatgtcctcactcccctctcctgtgactgaatgtcaataagcctagcctttggagagtatggtttaggcaaaccagtagagctacagtggtaacaatgggtaacaacaatgctatgtccagaggacagcattcaccagcgcttttttcactcctgcacttccctgagaggctttagaacagaaggataggtcaggttgaaaagtcagaaacccttccttggttagtgttagagagccaagggtggtgaccagaaaagcccccttcattctgagaaaacagcaagtgcagtaagtgcgatggtgacagagggagcctgctcacttagtgacagtggtgacatacttccaaagatctgattaggcatttgcggtttaaatatttggtttttagcttatgttttaagtggggaaatctgttgcctttcagtgtgagtacttgaacacctgcgcgttggcgtcccctggtggatacttttagaatctctgctttagcccactgctagcagttaaccctggtcttgtgtgctccagatactacttactaccttctgcccatcaggagctgagctgggttaccaatcaatagcctgagggaaaagtctgggctcagaaagatagagagaggaacgtgggggagacctagacagaacttgaggggaatgaaaaccaggaccatcgagaaggtgatgtggaacacgtgaaggaagcaagcaaggtgtgcctggctttgtatttgtcaccacgtgtaactcagggcagtagctccgcagaggtcaggactggtgaggattgcatcccctgttctgttcccagcattccttggggctccacgtgcacctttcgggaaggaagacagtgtcagagtctggttggtgatgcagttcactgtcatcttctgcagctaggggcagcatggcctactataagccatggtcacccaggccctgctgtgtccagccatggtttctagacagccagagagcagagtctggtggttgctttgtgcatctgtgcacaactatatctgagaacattgaagtggacgtttagcacactcgatggcaggtgcaatgctgggtatcctccaactggggacataatttcatgtgccgacagaactcaaatgtgcccttgtaattacagagtatactcccaggcacctagttgcacgaagtgagtcattctctcttataaatgttcttagcatcatgtttcttcttccagtgtgcacttgaacccaagcacactccttgggggagagtgtgggaaggagtagagcctaccacaaagaagaatccttatgtggatccctggaacccaaacaaatgaaagactcaaattcttttcaaatcctcctcctgccacagtggcagggtgacagaggattaattgattactgattgtgtcctttcttgttcctgttgaggctgtgccatagggagaggtacagtgcaattctaagggcaagagcactcctgatctctgcttggagagtcttagaactgacttctgcagtccatgagcatgagtgccttggatctgcttccgaggagctttgacagtgtagaagcacatgaaggctgctacatttccctaaacctcccagacatgagtgagggtgtagcatgggctctgcagcttggaaccaggttatggtgaggtaatttatttggaaagcagcacaaatgcttagggtctgtaagggctggctaagattttactatatggtcttgtttctgttttaaagctctatgtatggattgaaccctgggccatctatgtgtcaggcctggtttctcccactgggatgcattccctgccctttactgtttcttgtcagttgcttttttgagacaggttctggtaagtttcccaggctgccttgcactcctacttcctctgcctcagccttccgaggaactaggagcacaggtaccatcaattgttttaagttcaaattgtttgaaagttgttaaagtacttgtgccacaaatcatatggcttagacaattgtgtcccacagttctggatgaggagaagtttgaaatcaagctgtcagccagcagtccatgaactctccgactctcatggaggaagaaggatcatggcttgcatgcccctggcttgtgctctacaagagtctctgacattccttaggtgcattcatttatctctcttcacatatacatcttttagtgtgtttttgtcttcactatccatcccatatttttgtatgtaagtttgtgtgtgtgttgtatgttttgtgtggatatgcctgcatgtgtgcatctggagcccagggattgacatgttgtatctctcctcattttttgaggcaggtacttaagaaacctggggtttaccactggccaagaataactggccatttaatgtcagaaattctcctgtctctccctcctcagtattagcattacagatgtgctctgctctaccttgccattttatgtaggtgccaaggtattggattctggtcagtccatttatccagtaagcactatattgactgagctgtctctttaactttctaattttctctattgtataaggacactaaccatgctggatctccacacactggacaaaggttatctctgtaaagcccctatttccaaataatgatatattttgtggtgttgagtgttggcactttaatgtatcttttcatatcttttcagggtcaataattcagcacataatcacttttggcatatagtacaaaaagaaggtctgtctttctatatctttaagtgagacttttcattcaaatgtttctcacatcactcttgagagtttatttcaatgtaaatcttatgtataattctgtatgttatattgtggctttctcaactttagacattgtctgctgatttcttgtcatgatagatgaaattatagttcatttatctcttcctctatgtgcatattttaaacccttgattatgtaaaatgattaaatctacacacatacaatctacacacacacaaacacacacacagacacacacagacatacacacatacacacacagacgcacacacacacacatatcatggctcaactgatcctgatgtctactcttgctcttctcctttctttcctcagttgtttttctaaaggacctccacagcaaacatcatacatgtttaagtgtcgagtcagttatcttttgtgaatgtgcatgcatgtgttgagcatgtgacctatgctcagaggccagaggtcttgggtatctgtcactattaatctctgccttgtttctttgatatatagtctgtcactgcatatggagctcctggtttgtttgtttgtttgtttattttcttcatttaggctggcaaccagtgatgctaccatctctgccctctacagtcctcagtgttagggttacaggtatgattggcaaacttgtacagattttacttagtttttgagaaatgagtcagtcacaaatgatttaacattctagaaatttgtttaatattttgaataaattttatatagaaagaattggcctattttctctggatgtgcctattgtatgccaaattgggactgagccacagagaagtatcacctttttttttattttagagttattgcaggagtcagaagagggtttcagattccctggaactggagttatgtatgaatgtgactcataacagtctgtcccagtcctcttcaggaacaacaagaactcttaaccactgtgccatttctctagctgacagaagcctaattttatgatggtttcagctaaaggttttagattttagtgaagttacatgatttcctttaaaatgttcaatgaaataaaatctgagtgtagatcatggagggcagttcatatttttatctgttgtacttagaaaatatcggctctgacttttcaatagtagtaatcattcaaggctagagagtctacaaccaagaaggccactttgttttccttaaactggactatgtaccatcccttaaacttgaggttcattcattttgtggtcaccattgccatctactctgtgttttggcctccaaatctctctagttgtaatggaagttgagcctcagctatgtttctgtttggatttgaaccatggccataatttgtggaaaacactgagggtgtctttcattgtcttattccctatgtttctatctaccctaagcctggatgtgagggtgctcagagaccttgtttatgaacttgaaaagagtctgctaaagaactataaacactgtgtgtctaccccctgaagaggtatgccccccatggacagccacactgtcccacattttctagattaatgcctttgtttaagaaatttaggctttcataattttcagttttgaacagtaatgaggatattagtagcatgtagcatgtagtattgatatgagaagaaactattgcctttagtttaacatgttgcctagaagatgccacaatatcaatatttttgcaataacaaatacaaaactttcatcagtgtgcttgacattgtgctagatttttaatgggtgggggattaggcgtgactcatcaatagaggatctagtttttcaaagctccatttggtagaaagaagacatatccttcttggtcttcagtcaaaaatgagcagtaggtaattgttgccacaggagtctgactcccactcactgtgcccatctcttctcttctctccagaattttcttcctggctggctccagccaccatcactgtctactacctgctgcgtaattgctgttctctctttttacagacgtcaggtggattgcttcttcccttctaatatttgttcaacaatcacttcaccagtgaggtaaagtgatagtgactaaactacctcaatagaaaataatcagacccttcccctcagatttattttgtccaggcacattctctgagtttattttaagctcaatcagaacaggcactgagaactccagtactgtcaacaatgtccggtatacatgcatgtatgtgtgagagggcacacacaagttgtggttgtgtgtgtgtgcatgcgcgtgcatgcagtgttttaataaggatttgttgagccaataaagaggaaaagagatccttttaggaataaaatggaagtttgcaaagggcttctttggagaatgggctggaaagaaatcaagcccctagttatcactgcctactgtaaaatgtacgcagggaaagccacagcagcactgtttccggttaaggttctgcccaccttgactgatcgtgctcagacgtccggcgccatcaggctccacccccgacagggaggggacagaagagagttgcgcaagcgcattcgtgctcgggccagcgcccgggcctttgggcccgaggcagaggtgtcgcgcagttttctcagagactttggtggtgacagcggctgcagcggcggcggcggcggcngcggcggcggnnactgctacgtnatggccccgctgtagcctcacgccaccttcttgcaagactgcgtcgaggcagaaatgtcggccgccgccgccgccgccgcctatctggcggcagcttagcttcagcttgttgctaggctccttctgcatcgccctggagtccgcagcgcaaggcaactctgctacaggtgccaattccttgctccctgccttattcaaccttgtctctgttcctgctaatgtttattcttccacacatcctatcttcgtttttcattcttccttcatcattttcacccacatttcacccctccctactcaatatccatctttgcttcctttcgtcgattctgcccgcattcatctttctttttagcccccgcattcatctttcatccatccattcctccttcctacccctcctcttcctttccatcccttcatgttttttcttctctttttaaaaattaattttgaggatttcataaatgcattttataacatccccactgctccccctaactctactcagatgcaccctattcccaagctcatttacccccccccccatgattttataacccagagtccagtttgtgctgcccatatgcacatgggtgtggagccatccactggtgcaaattacatctcgccaacagttctttcctctccatctgtccattttcctttctttacccttccttctactcctcctttcctttctgctactgtcttctatccacccttttattttaccatccttccatctttccatctgacttctattccttccttctttgatcccccctcccatctttgtctctgtctttgtctccttcttcttcacctagatgtggagacatgattgaaacataagaccctcaccttggatagggcttttgtgtactccaaccccgcccttgctggagcagagccctggtcgccccttttctgggtggactgcctttatcctttcattaccctagggagggggattttagtgtcattgcatatggtataaccaaagcccctctctcctgtgcagatgctctgaacatccttctgatcattgtggatgatctccgcccctccctgggctgttatggagacaagctagtgaggtccccgaacattgaccagctggcatcccatagcgttctctttcagaatgcctttgctcaggtatgtccaaggacctttaggtatggatatatgcctctttgtgtatagacagtagggagaagcatgctgctgctctagagacctccttgaaaggggaaagcagaacttagaaaatgaaggcctaggcaagtctcttcacagacaaggaagctcacatttgcaggatttcccctccttcttgggtggagacagtgccctggccctaacacgcttaagacaggcttggctagctttcagctagaaacaggaattgacgggagctgaaaaatccaacctgtgggtctgccaaccgagttgtgggtggctgagagtgggcggctaagagtcagtccatggcagttgtcctccctgaacctccttttcagggctactctctaagagcatcaccctttctgggtacctaggggtgacattgcataggaaaacacaattgctgttctgagagcttgattgctgtcttcctttgctgggcagacaatagtctccagtacctgggcaaggccctaatcctactggttggttttgacatctacatgactcagctgccaggctgttgctgaggatctagagaggttgcttagttaccttgaagactgcagacacatttggctgtgacgttgttgacatttgcttctgctccttaacagcaagcagtgtgcgcaccaagtcgagtgtccttcctcaccgggaggaggcctgacaccacccgcctgtatgacttcaattcctactggagggtacattctggaaatttttccaccatcccccaatacttcaaggagaatggctacgtgaccatgtcggttgggaaagtctttcaccctggtactgttcaattactaaaacctgggccttttgtttctatgcttcaatactaggttgggactatccttgtagtggcttttcccttgtcaggcttaggtaacttgttcattgatgccattctatgaaaaacaacaaaacaaagcatttctttaacctagtttcatattcacattctaaatgaaaaagaatagaaagaaacagatttccttttagaagttggaggtaatgtcgtcagattcatgtagctgctgtcggagaggcaggtttggtgtcagttcagctctgggcttgaccacagggtggtccttaaagctctggtctgggccttgcaggatgcctgtctgtaaagtttgggggtgaggacctcaaatgtccagaggtattgtgtggacttgatgtccgagtatgggcttcagcgtggtgaaaggcactgctttctctgtgaggaatgttaggaagaggacatcagctgggtgtcaaattctgactttgaatactacctgataaagtagttatttacttcctaaatgaagaataaataacactttaaaacagataataggatcacatgatcccttgatttcaagatttttaagaaaccaaagaatgtaagtgtgtaattgaaccaccctggggaaagctgtgtttgatgtggcaaacaaaaattttcttgtgttttggacatagtgttattctgatttgtggctatgttatttttataattttacactatgagtgagagtaaatatttcgcattatattacactcctcaaaaattcatttttaatgacagcatagtagtctggcataacaggcttctggctttttactgatgtggaagcggagttgacctcactgggaaatagcatcagggatgtgggcacttggtcctggtctaagtgctgccacttcttagccatgtggctgtctttggctaagtttttcttcttctttgagtctcacattccttctctggaatgctggggctgtagttttcttgatgcctaacgaagggaacatgctagtagggacatccatgagtgtgaagtgtgttcaaatgctagagctgtgaccatgacggtacttctcaccaaaggagacagcttgggcgtctctaagagttctttgtacatcattatggctcaggagctttcttctagaacctaccaggcagtccagattgaaagtagtagtcagtttttaaaaagcaggcccagtcttgaaaaataatctatcagaaatcatattgtgtggctgaaagctgattatcacttgaactacctagttggtacagcatggcttaactgaggatatctggagggaagtgagtattttctagagaagagattatactttgggaagtgaaactaaacaaggcctctccgatgttccttgatctctttcccgataactagatttagggataaggttttctgtttctttttttcttttttggtttttcgacgagacagggtttctctgtatagccctggctgtcctggaactcactttatggaccaggctggccttgaactcagaaatccgcctgcctctgcctctgctgggattaaaggcgtgcgccaccacgccctgtggttctctgtttcttatagatcgcccacttccaaggcttagtaactgggaagttagatgctaattactaaaatcatgggcagttgatcttaatggaaacattatctatcttgccgttctgattttataggtgaggaaactgaaccccaaagaggggaggagctacttgcatagttgttcaattttaatttggcagtagggtattgaaagacctttcatattttattcaacaattttctttccctatttaaggtatatcttccaatcacagtgatgattatccatatagctggtcttttccaccttatcatccatcctcagagaaatatgaaaacactaaggtaggtctgtacaagggccgaggaaacacttgtctagaaaatgaactattaaatatattgattgttgtgatgtcttatagagataagcattagggtctttagtgattgctttgatgggcacaatgagtgcttttttatgagattaatttgttttacagtattttactacatagtctagacaggctggtttggaacttgctctgaagcccaggctggccccagacttggaatcctcctgcctcaggttccctcatgctgctggaattagaggcatagtagctgattgggagtatttctcattctaaaaccttatgttgggtcatggtcacagctcactcagtaaagtactcactctgaaagcatgaggatccacgctcaatttctactatccatcaagaagccagtgttgggggcacaagcagctcccccgggcttgctgtccagccaggctagtctaatgaggcacaactgaggttaacctctgcttttcatgtacacccctacatgttcagtggcacacacataaacgtgtgtacacatacacaggtaatgaatccaaaccttaactttaagcagtagtgtgaacagttcacttaatggatttgtcatgctcactctggatgaagtttagtgctgaggatcgttgtatccttttgatatccttttgatgttttatttgggtatcctttaattagttctggtctggagacacaattcatagcaataaactgagtgctatttggatcttgctggttcagttctgcttccaatgttgctgttcactgagtggcttaacaattgagggttggtgatggtgctaatcattcagtgtgtaactgtcagggtttctagttattggatttaatagaatgttacgtattttgttttgaaagacgtgtaagggacaagatggaaaactccacgccaatctgctttgtcctgtcgatgtggcagatgtgcctgaaggtaccttgcctgacaaacagagcacagaagaagccatcaggttgttggaaaagatgaagacatcagctagtcctttcttcctggcagttgggtaccacaagccgcatatccccttcagataccccaaggtagagctgccactatatctatattgtgtattgaaggtggtcataacctacctaccaggatgcctggtgcttactcgtgaacttagaatgatggtaatcttagttcaaaaacaagaagtactcttagaacatgtaaagagttttggaggaagcttgttggtggtggtacatagaggcaggcatatgtcttcgagttcaaggccagcctgatctacatagagggttccaacacaaccaagctacacagtgaaaccctgtctcgagaaatactaaaaaactaacaaacaagtaaccagaaagaaccttgtaagaaatgagaatatcctcccctggaggtttgctttcttttgtttgaactcatcatgcaggtgggattacacaatgacgtacagaggtgacataaagccaccaggagccatactctttggaagataatcctaggaaacggctgtcgcattagactccatgggcacaggagacagaattgcttatggccacttcaaatctatgcttctttgtatcatttagaatgtatagatctttttcataatcgtttccaggttttctctgcttgctttttcctgggcctgagtagcctagcattttccctttataaagagtgtctcttagttgtaactgagagtacagactgggaagtatgccctttgatgttgtaggcttcttctttgaggaaccttgtggatcttgccctcatagcaggagctctcagcaccattggaaaaagcttatggcatccagcctcctctgtttccatggagaaaagagttcataaagctgcctagcttgtaagcctttcagaagtcggcttttaatgttggcccttgtctggcaaccaggacctttgatttgggagtgcctaagtggttttggcagacatggtacatgctgaatcactggtttccttatggaagcctggaattttatggtcgaggcagaatgcctacatgatgagacccatgtcaaaactctatgctacagttttattgagcttcactggttggcagcattaaacatgtactgtctttcaactagctgggacaccatgtgcctcctaggtgaaattcctgggaagggactctgaagctggtcactggtttcctccagattttccttcatgtttgtttttccttttctgaatgggtttgaaatattttcactctagtaaatgggaccttgtgctaagtcctatgagttctcctgactcactgaaggttaggggagttttgggaacccactgtgcttcaagcccgcctttgtatgttggaagtaaggtggggagcagtaggagggaacagttgttgctgcgagtgtcagaaccgtggcttaggatttgttgctgttcagatctataaggcacagagcaggtgagagcgggtgagtagccggaaggcattagcgccaagccaatgtatcataggctttcagaaaacacaactttgtgcttttgccaaacgactagcaacctgtggctttgtatattcttgtcctaggaatttcagaagttgtatcccttggaaaacataaccctggctcctgatccccatgttcctgatagcctaccacctgtagcctacaacccctggatggatatcagggagagggaagatgtccaagccttaaacatcagtgttccctatggaccaattcctgaggattttcaggtactagtactatgcttgggggataagtgattgtgtaataccattggcgaggcaacttttgagttcaaggtcaacctgtttacataatgagctcaagaccagtctagactaaatagtaagatcttgttttaaaaagacaaacaaaacccttccttacgattttttctgagcagtggatttctcttaatatttattgacatgggtagtgctgtgcagatcaagttttcttactagtaccttagctcccctaagaagtggcatccagactcgttataaacaggcacagggatcagatgtagtttgggtgaacccccctagcccatgggggattaatattggtcacagttgggatgtttgtagaaaagtgcagaatctttagtttgctggcactttgatttactctgagggaaagcctaaagtggcacctggtactcttggggtgacttgagtgagctgagccttggaccagaggtaggtggggtatcatggccagtgctatcagctgtgatgtgtcaaatctctttgctccctgttagtcatttagttatgttgagtcctttcctcatccctcaacctttctctggtgactaaagcagacatgcagagccgtattctttctgaagtcttaggacataagtgctgaagcacgtggtagtgagttaaagagggtagcggtctcaaagtctactcctggcacttcctgtatctgatttgctaggcagacttgttaaaagtacagagttctggcccacctatgcatatggacccctctccctccctcctcccttcccttcctccctccctccctccatccatctctctttctcttcctctctctccctccctgttttcttcttgctttatttttttgcagtagtagtggttgaacctagggcctcgcatacattaggcaagtaccctagtactgaactatattcccagccctagaactgaagatgaggcaagagaaaccacatttcctcagaaagcatatgagatggttgtgatgcactcactggtttgagaaccactgcaaggagaatagattttaaaatgaagtgagtctaacacaaaaatgtatctcattcattgtccaaagccctttggccttgagtttgcacagccagagttcagggtgaggtgtataaattccacacaactttgtgatttcctgagttttaaatggcaagtagagagagtttggaaagcaagacgtgtgccatgttgccaactttcttcctagctctgtcttgttatctgataacacgatggtgtgagctgcagctttaggtccatacctattgtattagtgacaggcagttaaaatgcccctctaaagtcgacgaggtgccaggaagggctctaagcatttgcatgttctggctagatgaaaacttcaatgttagataaggaaactgctctgcgacctggtgggacatggagctggtgccaactggagctgcctcagccccacagtcccctaacttcaaacttccatgcttgcttttgtctgttcagacattttgttttaagttcacttcccaccccatggcagtgtcatgacctctgaagtcaccctgccttccttccttagccaaagagaagcaggatgggtgagttttctctgagaacattgacttgaggttttcagctgcatggagaggaccccttcatgttctgtctcccttcataacacttctaactattagacacagcaaacatcatggctcatactgtcacttgggtaatcttgtgtatagggccatgcctcatgctctatgggcctgagccatgctccctggcctattgtagctttggatgtctttgctaagtgtcacctctctccttccttcagctcccagttttatgcttagacctatacctgtttggtcacaagcctggctctagccccttctccttgtagcttcgttgcctgacattcttgttacctttcttcccactgtgtcttgggaggcaggccctgtggcatgactctccttgttcttgtgtttttctcagcacagatgttccatttgcagtatcctgatcctgaggcagtctagctgtgagagctcctggaaagaacacctgttgctgctaagcagaggttttcagctacctagcgaagttctttgcttgtttgctgaggtctgttcctacctatgttctctgcagtatctttgtctgctcatgtccctttgtaccatgcctcatagctctgctaagttctctcttcttctctttgctgctctgctccatcagctactgttggagggtagtgaaaagtaccctattctatctacatccatgatcttcctggtctgtttgttggacatctttctctgcatgggcttctgccttcctggatcactaagagttcccactatggcagacactgaccttgttggcaaattctgtcttaaatctccaccccaccaccgaagcttagtgctactttctctaatttaatctaatctaatctaatctaatctaagctgtccaattcctgggcttccttgccaacctttctgcccttcctctatttcaacatgcataacagggccttcctgtgtttcccacttacgtattgctacctggtcaatttcagccctccatattggcctctcttcccattctccctagttagcctcttgttagattgatccaagaactatttctctagcttaggcatccttcctgactttcagatacacatgtctaccttcctgtgagccactctcaggcagataatgatggagaccctaattctgtcccacatggccaggtctccacccctactctgccttttcttctccactctgtccccttctatcacatggcagcaggtcatcctgttttgttgctgactgtgaacttttgtcacccttggctttctcatcttcctataacactaacttccttgcctgtatctacacctgattgatgtctccgtgttcctcttaggtctcccctgttctctgaacacatctttctggacaactgcaatgcattttgttttttaaattttcctatttttttgagacaggtttttactgtagccccatctagacaacaatgcatggtgatccttctgcctcagctttccaagtgccaggattataggtacatacactgtacctttcagcccttcttttagcattctgaattcttcttaagggccagcagtagtctggtgctgttttgtctaaagcccctagaatctgcccttctgttgccacaggacttttgctaacctgcagcctatattgcattacttttatgtcttgaaaaagcttcttggcctatagcctgggacttttcatcccttaaagaccttccaaatctgtttcatctggccctaagccgctgtttcttgtttgtcttcctatgtcattacatagctctgactgtgtcctgctcttctgtcactctactttattgtatgcataacaactgttgctttacagcatcttgctcccatttgggtgatagccatgggaactcctctgtgaggtcttccctcatttatcttgaccaactaacttgaaggctcattccatgtctcagccttggtcctcctgataacgtgtatgcttacttatctatagttgtagttttattagctaggttgctcagcaggtctgaggtttgtgcctacttctttgttgctttctttccacgactaacaggcaggaagtatcttgagtcccaagagaactaaagttctctaggctccagactgaagtttatttactaaaaactatatgtaggcagtggttcagcagaatctttctataagcatagatgtgtatcactgcagtcagatgaagggacaagtcttatgactgtccctatcctagcagtgacaagtagcagctgacaggtccgtctgataaggcaggggccctgaggaaggcagaagatggggctgatctggtaagtggttatcttgcttattactgtttggggagatgaagaataatcttttgccttaaggcttatatgcaataattgaggagttagcccaggatgggcttctggcttctttacttatgggtatagactagcagtcccaacagtcccttttgggtttagggactttgactgctctcttgtctttcattgttcttctgcccattgagagtgtgttaaaatgagctaactaacagtggtttgtgaacttaatccatttccacttcttgctgggtaagaagtggtcagaggaaaggcctactcagggtcactctttggagctaatttgtgtcttccccaaaagatatactgaaccgtcgttatacatctgatatctccttaaacctcagcatatagcctgctttaagataagatggagtcattctaatcaagtccctaatccaacttgactattgtcctgataagaaaggagtcaggtagggaggatagtgacagaaacagatggaaactgcgtgcaatgactattgcaagccaggggatgcagatacctgtagaaatttcagagatggcattccacaaaacttgattttgtttggacttttggtatctatggctgggaggcaatttatttctagttcttcaagtcaccttgtggcttgaattgagccgagtggtatctttggcataccccttatcagagaatgtgtggctctgagcatacaaggattaagggatcattttctgtttagatattcatttctagggactgtctggaatgtgcagagtagacagaaaggtacagtaaattgcatccatttgccatgatctgtatcctaaagtaaaagctgattaaatttcaaacatgccagtttggttctgcagattttaagttagtctggactctgcaggcaaaggagaaggaacattaggttaaggctaagaatcagtgaatggagaggttgggattgggagaaatgcttgttcaggtagctattcattttgtatgccaaggtaaataaaattgttttcattcttgtaattctgtttttcatttgcagcggaaaatccgccagagctactttgcttctgtgtcctatttggatactcaggttggacatgttttgagtgctttggatgatcttcgtctagcccacaacacaattattgctttcacatctgatcacggtaagcgttttgcagggtattggtgaattgagtatctcagtttcctgcaaaggacactttgaaaaattcccatgtccataggggtgctctgagtccaggatcatggggtgcttttaaaagcaacttagttgtttgtgcacctccatcttggatatgtgaaaatggaggcaggtgctgtatctttttatcttagttgcttgtgagagaggatttgtttttgtctcttaacattttaaacatgttttcttatttttaaattatatatatatatatatatatatatctgtgttggtgtgcatacatgagaacagtgcctgcagatgacagagagggtctggagccatagacagttgtgaactgtctgacatacgtgctagaattcaacttcggtcctctggaagggtagaaattctctgaactgctgagctatctctccagccccagtttattttatctgtatgtgtgtgtgtgtgtgtgtgtgtgtgtgtgtgtgtgtgtgtgtgtgtgtgagtatctactatgtgcgcagagagcagctggaaattgaggcggttgtgattgacctgagacaggcactggaaactgaactccggtcctttggaagagcagcaagcactgttgcccacggggctgtatgtgtagcatcatggccacaatctcttaacggctctggcacttgtttgtagctccagcattgtctggagcctgaagaagggaagttgcaggctagtctctgcaacctctcctggcaaaagtcagcaaatatgactgtaaataaagtacaggtggacgccagtgcttccctcagttcatttaagcttttggtatttgtcgttatttttacaacatacactcattgtcacacacttttgtctttaaagcatgcttatatgtaagctggttgaggattcccaacctgtagtattcacactatcttttggaatggggactttaagtgaatgctaaggatttctttttcttacttggagctgaaaatttgtattatttttttgtcttcacgtatgaatgtatatgataagtgttttaaacgatcaggataggggctggagagatgggtcagtgtttaagagcagtgactgctcttttagaggacctgggttcaatccctaatacccacatggctgtcttcatactgtctgtagctctagttacagggaatcccacatcctcacaaagacacacacacaggcaaaacaccagtgcacataaaatgaattaataaagaacccaaaatatccttatcttatatttttggttgtgagcctagcctttaatggctgagccatctctgcagcctaagatgtccttatcttgtgtacagttatgtagctcatacaaccctggtattaagaatctgaagcccagagggtgaagagatgactcattggttaagactgctcttccagaggtcctgagttcaattcccagcaaccacatggtggcgcacaaccatctgtaatgggatctgatgccctcttctggtgtgtctgaagacagctacagtgtactcacatacataaaataaataagtaaatcttaaacaaagagaacctgaagtccctgatagagggcaaagtagtagaatggctgcctttcaggtccctgtcataaggaagaattgctgagtgccgctgagtggtagagcatgtgcctaataggcactaaagtatggacagcttcctgccttggcagaggaagcatgtttattgggtgcctcttgaaacagataaaactcagtgtatattaatttttattacttttaaaaagtatagtttttttcccccaaaactatagtttaggaatttaagggtgtccttttgaaggtttcttctttgtgaacagatgtctgctttggaataaaacagcatttatatgaggaacattttataattctagagggatttccttaagttatgaggtttagtgtcctctggtctttatactgaggaatgaaatggtatctaaagtatgaaaagcataatatatttactcattttcttatattgtatgcttttttatggcccaggatgggccctaggtgaacacggagaatgggccaagtacagcaactttgatgttgctacccgtgtgcccctgatgctctatgtccctggaaggacggccccacttcctgcggcaggccagaagctctttccataccgggacccctttgatccggcctcggattggatggatgcaggtacacacatacagacagacagaaggaataatgcctagcaatgagaggacctgtgctttatatgcgaactaccttatcagacaacaagctagccctctttgtgctatgttggaattcattctcaatactatttcctatacatatatttcttagcatctcccatgctctaggttgggagtacatggcagaactagagctgacaagaacagccactgtacatggggctcttgggaagtctagggggccaaaagagcatgtgacatttcagaggtgggagaactgtttagaagtgacaacagcatgttagacattagaggaagtggctatagactgctgggacaaagtctccccaacacacaagtggactatttcacagatatgtcttatatcccccattttaggggggagactttcaattttgggggagtattttcaattttggagctcattgacctactaaaacacattcatgtaatttgctctgtactccccagcaggaaagggcatctacgttgatttctacatgctttgaaaacaggtccttttccaacttgtgtgaggtggctggtgtagggttctaagacttgtatcctgactttatcagctgttgtttgtagggtgcttttctgtgaactgcgctataccagcgtgccccctttcaggactggctggccctggactccatctttatcactggagtcttgcaatttatgttctctgttgtataaactgatcttgggtttaaaacattctggcctttctggagttttgagttttgattttcctccttttttgcacatgttgcatgctctatgtttctttccaaacaccaagagaaaagtgaaatactttcaaggcatatttaactatttattgttggggcaaatctggtaggtaagagttctttttgaaacttgttggaagacactcagcaaatagaagtccctgtattgtagtgtagccagtgctttccaagtgtaatctctagtctttatcttttctccgaacctcaatttgtatttcaaacagtttgtcccacttggctagtcagtctgacatgcctagagctaaacttatagcgcttcaccttcatccttacctttgacacactttttcttagaaatgacaattgtcattggtacatctacacaatggagtactactcagctattaaaaagaatgaatttatgaaattcctagccaaatggatggacctggagggcatcatcctgagtgaggtaacacattcacaaaggaactcacacaatatgtactcactgataagtggatattagcccaaaacctaggatacccaagatataagatacaatttcctaaacacatgaaactcaagaaaaatgaagactgaagtgtggacactatgcccctccttagaagtgggaacaaaacacccttggaaggagttacagagacaaagtttggagctgagatgaaaggatggtccatgtagagacttccatatccagggatccaccccataatcagcatccaaacgctgacaccattgcatacactagcaagattttattgaaaggacccagatgtagctgtatcttgtgagactatgccggggcctagcaaacacagaagtggatgctcacagtcagctaatggatggatcacagggctcccaatggaggagctagagaaagtacccaaggagctaaagggatctgcaaccctataggtggaacaacattatgaactaaccagtaccccggagctcttgactctagctgcatatgtatcaaaagatggcctagtcggctatcactggaaagagaggcccattggacacgcaaactttatatgccccagtacaggggaacgccagggccaaaaagggggagtgggtgggtaggggattgggggtgggtgggtatgggggacttttggtatagcattggaaatgtaaatgagctaaatacctaataaaaaatggaaaaaaaaataaagtaaattcatcaaggttaaaaacaaaaaacaaaaaagaaatgacaattgtcacataggccctcagaccacaaaaccaaccagctaaccagccaaccaaccaaaaaatacctgtagagggagcctcgtaatgacggctcctcagaggctgaagtatgaaaatcacatgctcaggacatgtctgaggccatcctctggcgagagcagcctctgcaatttactgagaactcgcctcaaaaccaaaaccaaaccccctccaacaacaacaacaaaccaaaacaaaaatgcatgctcagggtgtggctcaaagctacagtgtttgtctagcatgctatttcaattcctaggtatacatagtatgcaaattcagtgccaaggttcaattcctgctactgaaaaaagaatgttcagagtcttttcaatccatgtttttttttctttattccatatatgctatgcaatctagcagcaagcatggccctctccattcggaatctgtctctgcccattctcagtttcccttccaccagccttctgctgtagcagctttctgaagtctccttgcatgtgcccttggttctcgagtcttctttctcgtgacattgcaagtaaccatttcaaactcaaagcagaagtcgggatctacctcggtggtggagttcatgtctaggctgtactgaagccctagcttcttatccgtaacactgcaaagatgaaaatcaaaatggaatataaaacctccaaattacagccctgcacaggagcctcctgtgctcccatcacactgagtcaatgtcttcacaatggacattaaggccttacatgacctccttatcatgttgcctcctcatgccatgtctttgattcttcttgacaagtatccagagtagccttcctgtgccattgtcccacagtcttaagtcttcttgactagattgagtgggaacagtttttcagtgatgtacacctgcctcttttactttcatagcggtggggttttttgttttttgtttttttttatatgagagacttttcctaggggtatgcagctctctctctctctctctctctctctctctctctctctctctctctctctctctctcacacacacacacacacacacacacacacacatctactcccccaagaaagggaacccatgacacaccaaaggaacaattacaccagaatccaacttagtcaattagtgagttttattggagctgctaacaggactctgagtgaaaggttactcacaggagcaccaattactcataagcacctgcattgctgaaaagcccagatccgcatgggtatgactcagaaaagctgggtccctagagttttctacacggttgcaggaagcttgacagttctaagaggggacctgtgaacagctgggctggtcagagtgtcccccttctccagaattgtttactgctgtcaatccatggatggatatacacaatgtggtatatatatatatatatatatatacacatacatacatacatacatacacacacatacatacatacagtacgatatacacaatgtgttatacatatgtagtagaatattctccattcttaaaaaggaaggaaattctagtgtgctatagaatagatgagccttgaggacattaggttaagtgcaaataagccacagaggcatgtaggatcaaatactgagaccactcacatgagctatctctagcagtcaaatgcatagtgctacaaagtagactgagaattaccagttgacggtagtagaaaaatgggcagctgtttggtttagtgatggtgatgttctgaggcagtggaaacagaggtgtacaaggagttgtagaattgatggtgatgatgacacaatatgaatacatttattgccactaaagcatggttaaggttgtgaagttcatgttttgtgtttttaccatattaaaaagaaaatatggatcaaatacaaacacttaaaaacaagtcatcttcaacagatttttacacagcgggtagagctttaattgattaaatgtgtctgaatcaagtatctagctctaaactttaagtagtttaaaaatgcttctagctggccagagactgtaactttccctcctgctagtccattgggtgtcatagtgaagagtggcgtcctcaagtagcacttccaagctgcttttacaaacaaatggatgttgtgtatgaagaagagatgggggagaggtggtgctcagacaggcttctgctttcgctggtgtctgcagtgtactacatgcaaccgtgctgtttcctgtttcaggcaggcacaccgaggacctcgtagaacttgtatctctcttccccacgctcgctggacttgcaggactgccagttcctcctcggtgccccatcccttcttttcatgttgagctttgcagagaaggccagaatcttcagaagcatttgcagctccatgacttggaagaggagccagacttgtttggtaatccccgggagttgatcgcctatagccagtacccccggcctgcagatttccctcagtggaattctgacaagccaagcttaaatgatataaaggtcatgggatattctatacgcactgtagactacaggtacactgtgtgggttggcttcgatcctagtgaatttctggctaacttttctgatatccatgccggggaactctattttgtcgattctgacccactgcaggatcacaatgtatataatgactcccaacatggaggtcttctccactcactgaggccttgagttctgccagcctcagtgggcacatatgtgtccccttccccccctacccattgtattagatataacctgagtgggaaacagtggaaacatgcatcagcaatctggcctcggactaggtggcagatggccctttttatgtagtccttcttaagttagaatttgccattggatttgggctaagctgaaacttttattttaaaagctcccatagcttcgttactacacaagtacaaagtgaactaaggtataatcttatctttatatctaaagaccatgctagccagacataatactgtacttaagaaatcatttgcttgttgaatttagtgcatttcagatagtaaccatatgtcttacgtagcccagagtgtcaagcatgttaacatgggatttatttctttctcaaatgtgaaattcaagttgcttctagagttattgcttctaagactacagatttagaatcaaaggtaaaatacccatgtgatgatcaatgtggtgtttcttcattaaataataaataatgcttagtaaagtatagttaaagttaggaaattcagttaagtatttcaatactctctggcccaaataataatttgttagtaaatactacaattcttgaactcagtggctatctgttaaaaattctgttattcacaatgaaatcatctcaaatggaactattcccatgatttgaatcattccagattgtattcatatgcctatttagaaaactgcagatatccatgtatcctggaggcaggaggtattctactttttgctaaaacaaaacaaaacaaaacatgtttatgaaatgtaaattatcttgagggttgtggatactttttattaatagggtataagtaattttcagaatgtagttctgtgttccctaagtacgaaggtaactagaatatgggcatgtagtaaggattaggttatttcattactgtcaccagacagaagtccttcctctaacattgtgaaaactgttcaattaccaggagtcaacagctttctaaataaacattctatgtattttgttttgtatttaaatgagtaatttcaataatttcattaaaaatgattcagtgtctcaaggtaaatgtttttaaaacaaaaactatagtaaatagctgattagattaagttactgtcatgtattaaattgtaaccaaaaagtcaagacactactttgaagtgtgtaaaatttcaaagagagattgttgattttaccagctggcctatagtagagtagatttgtctgttgttctgaaactgacttttgcaaaggctttgctcccatctttccttgttcttgatctttactgctctcctgatgtctactcagtgtcattttacaatttagtttagaaactcctcacagcatgttttcttttttttttagcttcatctccttcatagagggacagattttgacacaagtgtttatttgacatctatttattgttcctgtttggccatagtgtgtgtgtatgtgtgtgtgtgtatgtatgtgtatgtatgtgtgtgtatgtgtatatatacatatacatacacatacatacacatacatatatacatatatacatatatacatatatatatatatatatatatatatatatatatatttaatcttccaaagtacagttttagtttaaacccctctgaattctgcttccaatgacatatgtggctatttaaatttaaattcattaacacaaaataacattttaaaaaatttctgttttacttcgcacttagaaccttcccatcctagcagactggacggagatgccctggattcgatctagatgtgttcaccctgattggcaggtccctactgtcctgcacttgcccacaatgagcaaactatatttggtttaggcatagagtagggagtttgctgtggccatcagcttcttccttccactctcatcaccattgcctctgtccttctttctttccttcccaagaaatttccttcccctccttttccctcccctgttccttaaagaatccatgtgtcttcctaaaatccctcttgacccctgccctttaagaacaccgtcagtgcctactaagggtctagaaagacctccgttgagcagtcagagtcttccctggctccacaataccccttcccttggctgactctccttgccaatccttacctccctggtccttcaagcctttgtcccctcttctttgctccaaccccttcacagccattcttcatagcctggctcccctacccccctgcttagaagctgaggctgtcaggactctctagagtgtattatgggggaaaatgaacacatcttaaaaatctgttatttgctacatttttttagaaggcatttttcctcatgagtttgatatgttaattatacagaaattggaaagcagaaatgcattttaaaaggcaagaaaatgtctgagtgctttatactaagattgccatagtttgttctttttggggtatgaatgttttacatttcttgatcctctatgttgtttataatacaacttctgctctttctttctgaacattatgtatggttggttattagtgaattttgcagatattttatattgctggtaatatgtgttattgcatagatttattgtaattttctcagccttctttcagttgttagaaatttagattatttccaaattttcagtgttacaaataatgctgtgatcaattttgtgaatatagtgtttttacgtatttcaaagtattcccataggctagtttctcagtgccaagtcatcaaaaacagctccgttttctcttcactcttgctatgatagcatattaaacttagaaaagaaactcaaaaggcctatattaaaaaccataataccaaaaaggaaagtctgtagtcctataataatagatgagagttgtattctgctttaatatctgattctttgctgattaacgacatgaaccattatgctctctgtatgacagttgtgtgactttgtgtggtcatgttatggatcttaccttttaatgtaataaagtaaattgctcttttcctgtgtgacagtttttcctgtatatttgttctaagcgtagaacaactctatttgggacctgaataaatactcattttcctttgaaattttttggggttcttaatgttaatgtctttctacctaattataagagtaatgtatgcttattgtgtgaaatggtaaaaatatgatgaagctagaaagaagcccactttcttagttgtctttttgaaattatttttattttatgtattgagtgttttgtctgtgtgtatgtctgtacaccatttatgtgcctgatgctgttggaggccagaacgaagagttgaatctcctggaactgcagttatagatgtatttagttgcagtgtgggtactgggaattgaacccagctcctctagaagtataatcattgctactaactggtgagtcatctctccagttcccttcatttcttttggagttgtgacaacatacatagacaaaagcaaccaaggggaagtcggcttgtttagttaccagtccattttgaggtgcaagccaaggtatcaggagtgtggtggtttgaatgaaaatagtccccttagatgcatagggagtggcaccattgggaggtctcgttagaggaattatgttagtgggggtgagctttaaagtttcaagtgctcaagccaggcttagtgtgtttctctcatcctgctgcctgcttatcagcatgtagaactctccagtactgtgtctgcctatgtgctgctatgtttcctaccatgacaataatggactatataaggcagccacaattaaatgattgcctttataggagttgctgtggttatggtgtctataacagcaataaaaccctagctgagaagttggtacccgggactggtgtattgctgtgataggcctaaccaggcttttatttagaataatgtgggctttgagactttggattagaaaagcagctgaacactttaaatggggcttaatggatcatattagtagaagcaaggaagacagtggtgctcagagtgatttgaactgtgtggtccctggctcaagaggtttcagaggagaagaatatttgtatgtggcctaaagacgtttcttgtaatattttggctaagattgtggctgaggttaaattgaagagtttttagattaattgagttggcagaggaaatatcaaaacagcctagtattgactctgtggtgtgcttattagtgttcacttttatgcagatttataatgaaaaggagcaagctgagcaaggaagaatacaaaatgtacaatttgagaagaaagggggcaccaggaagtggaatgaagctaagtcccgagtgaaaggagataagcagattaaagaaaagcctgatattatatgggacaaatggagtggcaacctcatggcaagatcctacccagctaagcttcctacttatgaaaaggaattcaaagtttaggtccaggcctgtaaacctttaaacagagcattctagagccaggcagatctctgagtttgatgccagtctggtctacagatcaaatttcaggagagccaatctcaggcatgaaggaaactatcaacaacgaacagctgatgacaatgtaattaaccaagggggctaagttcagccccagcaagcagaagacccttgtaattttgggcaagtagttctggttttagagtcaaggatagaagaaaggggccatggaatttccctccacagttaaggaaagctgctgagtccaggtatgtgtcaggtatgtccctgtgtggagacacagaaagaacattgtatgaagctgtgaagatgaagtatggatggcattggagacctcaaaatgttggggatgccagagctgtggggtacctactgaagaaagctgctaacaaggtgtggaagcagcccacccaggagagagaaatgtattgcagttccaaagactgaaaggagtggagatctgaagaccactttgacatcacacatggagatgcggggtttggagtttgcccagctggttttcagtcttgctttggtccagcatttcctcactactctcccctctctcccttttggaatggtcatgtacttcctatgtgtatatgttgaaagtatatgatctgccgtttgattttgactttacaggggttaaggtcaagagctttcaaagagactttgactttagagttttaaacagtattgtgattgatagattggggacttttgaagttagattgaatgcatttctgcattatgatattggctataagcttgtgcaggccaagaagtggaatttggtgatttgaatgaaaatggccccataggcttaaagggagtggcactattaggagtggccttgttggaggaagtatgtccctgagaatgggctttgaggttttagattcccaagctaagtccagtgtcattctcttcttgttgcctgctaatccagatatagatctctcaaccacctccccctaacatagtatctcccccatctgcctgtgtgtgcttccatacatcctatttgatgataatggactaaacctctgaagtataagccagctccagaggaaatgttttcctgtataagagttgccttggtcataacatctctttacagtaatgaaatccaaattaagacaaggatcttagaacccttggtcatatcccacaacagtcagaagagagtaatgaatcactatgggctagctagggctctgcttgctttgtacacgtacagtccaggatccttagacaaaatggttctgctcacagttcacatggattttctccgtatcagttaatgtaatgacgataaccccttacaagcttacccagaagtccatctcccaggcaattctgtattttatcaatgtggcaacactaaaagttatacagagccttcagaatgtagctaatgttgacatctttgtgtatttccactctcttttgtgtccatgtaatatgtgtaaatagagacattttttctttcatagctggagtctaccagtcttaattgcaatctaatgtaatatataagtatttttgcagacagggctttattatgttgcctcaactggcctcaagctcagtatactcctgtcttcagagatgtgtgctgtcccagcttaaataacacgatattttgtattccagaactggagctcaaacctaagggctactttagaagcatgctaccctcaggctttagcaggattgctttccatggtctttggcaggtattgattaatagttacaactaccaccttccccacaccactctatttttgaaaaaaattctcaaattttattatgcatttaaaagttaataaaatataagtcataaaatttaccatcttaaccacttttttttttgagacagtctaactgtgtaggcttggccggcctgaagttcatgtagaccaggatggcctggaactcacagagatcctcctcctgcctcccaaacactggaatggaaggcatttgccaccaaactcttctatctttactgtttgtaatggtgtgtttctcgatcatagagtaagattatgctgttgtgtttcaatcaccactatccaaccagagaactttgttcttgcaaaactgactctgttctattaaatagtaaccccatttcctgcttttccagcttccaccaactaccacgataactcatgtttctatggatttgactattttaggtactgtatgtgtgtagagatagagttgggtccttttgtgaccagattattgtagtccttttaatgtctacagtatccctccacactgtagtatgatagaagtgtctttgttcgtgaggcagaataatattcagttgtatgtactcaccaggttttacttattcatccatggatatacagttggattgtttgtacctttggctatcattgacagagctactatcaacacaaatacccaaaaatttgttccaatccatgattgtgattctttaggatgtctactacgttaatctttcattacttaagtaaggtatgggagtgtggtgtgagaggtgacaaaggtggagaggctcttctaggttacagaaggaaatttctgcacagcactaagtctcatccccactttccaaccctactgttgccagcttggctcccaagccacccataccttattgtatgaagggcttctaatataacttctcacagggttctcaacttcttttcctcctcaaagcccatcatttgggctccagttctttgaaagagtctcctgaattcttgcctgagttctgagatcacattaggaccaagattacccttgggcctctgtcctttgcctcttcttgcctattgtaaaaacagctatcagcttagttcatttactcagcattccgtgggtacccctttcttttccagggcagtttttctctgctcagtatgtatatgtgaaacagagagaaatgtcatcatttggtacctttagatcacctgcatgactactatgggtcagagttctcactgcttgggtctcgcttttccacatgctacttgaaagctctggctagtttccttgttccttcatgcactagatgtagcagatttgtatttgcttagtttttgataaaatacatgccagtcagatgtggctaggaggccactgtcaaaactttttggggggtggggttcagagttgcccagttgtaacttcaaatttgcccgaggccacttttattcataatacaagaaaaggatgactttgagttttgtgagatagggtcttactgtgtagcccatgctggcctcgaattcttgacatcctttttggctcagcaaccctgagtgctgagattgccatgcctgacaaaaatgctattttagattctggattataggcaaagtttcttatcctctgatgggagaagagtccagattagaggaaatggagataggtaaggttggctatagatagggcatcattgagactaacctcagggatcaggtaatggccactgtggcagggcccacttaggactcttactgctaagaagatccagtagaatattatcacacgttaaggaagcaagagttaggatgagcctgggattagccgctctgtttttttcttctctaaaatccagagactatgactgctgtgggtaagaagctttgggacaggtctaggttggcatttataaacccttgccctgatttattgccctttttgttatgttttggaaggaattctttgtgggttatttttattcaaaactcattgcttacttaacaggttttatgaattcgtctctttcacacattcaaaagcatgcccctgtgtttgtgttaagagcagcctgagttttcatatgaataaatcatgctgaatatgtcattgttattgtatgtacagtttttgggtcagggctcctcagtgcttccttaaaatggacgacattgactgaatcttaataccactgcccacgtttgtctctctgtgtccctaacccattcttactgtgcggggctaagctgctgtgctgtgggtgttcttcaggactgcctttttggttgcttaattttgtgtataaaatggtgtgtttgtttgctattttctacctaaatgtaattgtgttttgctcacagttgtttccctattctcctactttgtctttcatcctctttttggtcttcttcctctggctgaatatcctctgtcatagtttttgtggacttagacatactctccaagagggaatctcatttgaggaattaccttcatcagattggccagtaagaatgtctgtgggagcattttcttgattgctgatagaggaggggccagcctaatgtgggcagcaggtcagcctgtataagaagatagttgaatgagtcagtaagcagtctctgctttagttcctgccttgagctctttccctggcttcccttgatgatggactataatatgtaagttatgtgaattctatctttgctgtcttagttatggttttattgctgtaaagagacaccatgaccaaggcaaatcttataaaagaaaccattttgttggggctggcttacagtttcgaaggttcagtccattatcaccatggcagcatgcaggtagacatggtgcttaagaaggagcagagagtgctacatcttaatctgcaggcagccagaagaaggctctgaatacacactgggcagaactcatgcataggggacctcaaagcccactcccacagctattccaccaaggccacacctcctaatagtgccattcccaagagccaagcatccaaacacgggacaggatggggccaaacctattcaaaccaccacacttccccaagttgttttttatcactatcacatcaacagaaaagcaaactcaacccaactcccctccccctccccttcccctccccctctccttccctccccttcccctcccctctccttcctctcccctctcatctccctccccactcccctcctccacctgtggtttgcccttgtgaatggacactttagcatatgattctttttaaccctcagaagaagaggggaaaagagagggagatgggagaggggaggggaggggagaggtaaggggaaggaaggagtggagaggagaggggaaagggaggggaaggaaggggaggggaggggaaagggaggggaggagaggggagaggaggagatgggagaagggaggggaggagagaagggaggggagaggggaggggagaaaaagagagaggggaaaagggaggggagaagggaagagaagaggagaggggagtgtggtatgagaggtgacaaaagtggagaggctcttctaggtttcaggtatctgcacttgctccaggccacatacttacatctaaagttttggatctaggattcacaagtaggagagcaagtggtattgtctgcggacgtttttaaatagagacattttgtttgttcttgctggtgcctagggaatagaggccagggattataggaatcatacattgatcagattcccacaacatatgactatctagcccattaaagtacaattttcttcattaaataactctaatccaggctgttatttcacagagaattaactacagagacttcaatattttagatttttgattgaataatgaatattaattattaaaataatatgtttggctatataaagtgaggataatttctcatgtagccttgaaaatatctttaaagggagcaaaatagttaaaatacaaacaaaaaaattacagtttttctctagtggtagttttctgtaagtcctctcccatgcaggttttctcttttatagaagatgagtcataccaggtgatttcttttaaagaaataatatattccttacttatgaaaatataaaatatgaaatatattcctttcttccttccttccttattcttagtaataggaaagtcaggaaactgtaagaggacaaagacagtcccagtgatttgggaggctgaggtaagaggatcagaaggttcaagcctagctgggctgcagagttcaaggctagcttaggcaatttacttaaaccctctctcaaatttttgagaaagtaaaaaatagacttggtgataagacaaagtgtacaatgttgtcatttatgcatcaagcccttagtttaaaccccaggacaaacagtaaaaacaaaaccagtatcaccaaagtttacttgaaataactttccttctgtgttatatattatagagccatagtctacctcctttttatttcttacattctaatttaaaacatgatttttattttgcatgattttccccctcctctcttgttttctcatgctgaatactcttttcatatagtttttgttgaaaaatcctttttgtgcagtattttctaattatgattccccttctctgactcctccccgatctctctctctcacctcccccacccacccaattacctgccctctctttacctcatccccttctctaggaagcaaaaaacccaggcaaacaaagaaaatcaaaacaaatcaaaatttataaaaaagcaaaatgcacaacacatacacacacccacaccccacaaaaacacaaaataggaaaccataatatgcaagcaaaagctcagtgatgcaaaaatgcccagagcaatatgagattaaaaagtctacaaaagtaccattgagtttgttttctcttggcaactactccttggcatgcctgctgttaagagtggttaatatacccagtgaaattccactggagaaaactagttttcccttttgtaaagaaggtatcaattgcagataacctcttagttaaaggagggagcctttgtccactaacccttgtcagtactgggacaccatcagacttgcacatcttgtcatagactctgtgagtttgtgtgtcatcccttttgtgtcggtaaagtactgtttccttgtagtcatccatccccctggctcttgtaattaatctctctgcctctttttcctcataaattcctgtgctctgaggggagaactttgtgagtgccgcagaccctctggatccctttgtctgcgtggaacgggcctctggggcaggtgggcaaagggcctgcagcatgtgaggacatcccactgaagaccaactgtcccacagtctctgactctgtgtattgtccagttgtgggcctctgtgttagttgccatctactgcaagagaagcttctcggatggtgagcgagtgagtctctgatttataggtacagcagaatgccaggaggatgcaccgtactgttcctttagaacagcactggtatttgattctctcctaagccccatggcatttctcaggttcttgtccaccctggcagtgccatgcatgggtttcatctgattgagtggtccttaagtccaactacagagtggtcctaactggtcccccactcttgcagcagtgctgtccagttcacacagttctaaagagaggttttgtaaagtctaattcttgtctctctactacttgtactttcttcctgctatccctggataaatcagtgacttgccattactgtggggacaaatagaaagttctttaatctggtcttgggacagatcctttggcctgtaccagcctgctacatattctaaaatctactccaactggggccagctttatcttctgcaagggcatccttccctttgactaaatcagactacaacatgcagcatttgcatcccacttcttaggtctcagctaactgtgcttttatattcatttcttcaatgacttcatttgcatctgtttccctggtttggtcagtgctatgagggcacagcctgtctgtactctttattgtcttccaggtctgtgatcttaactttttaaatcctatttttaataagggttcttacacatgttaacccccctttaagcccactacgtaccagaggtagtggaaaagaaaggttattaggatatgggggaagtggatctgtttagaaattgttctttggagcaatcccatgtgtgttgtcaggaaatcagcagttcagttcactggtcagcagcagctcgatccaccagcagaccagttcagtagtgtcaggatagcagcaggggtggtatgacctagcagaaatagttaggcctcagtcgaatcagcatgagtcagcaggaggaattaggaccaccaggaacaccaggagaagttctcggctgtgcctctctcaactaagcgaagaccagcaaagactcgagacaaagaagtgccagcaaagcccctcacagtctgttgagtctaatgtatactccctccaaatattacctatcttctatgcttcttgcctccccacgtgtcttgccttagcacaagagtctgtcttagcaaaactccacatgagtctgcatcagccgacatcactatcaattggccagagccagagtccttggaagtggcaagaagctgccagcacatcagacattctttggtgtgtttttctctgagtcccaacaaatggagctcaacaacgcagaccaacacatgagtgtcattagcaaagaatccttcattatgcatccttttattggcttgatttagcaaaacatcctttcatctgtgccttcttcagtgaaccgttctttcaggagtctgccttagtgaaacatctcttcacctgtttctgcttcagcaaatgttgcttcctatttgccccagcaaaataccatccaacacaaccgactctccaaagaaagcagaagtttccacttcacaggtccatcattataatggataccttattttccctaaacttctgtcgctgactctttaggttgtttccagtgcaaattctattgtaaattataacatggagaatttcactatgtgttcatctttgcatgcctgtgtgttaacatatctctaacagataaacttgtggagtgtaattagctagttcaaggcatgcatcaaggacatgagtcaatattttggcaactaaacttgcaaatgctttcctctatttgggaaactcctgatattgtcctgttgggcaggaggcagagcccacttgctagggtggaggcacaaaatggcagatgctcatgttcctttgccattgtaatgagactatgctgtcaacagttcatgctagagaaccatacaatctgtgttttaatatcacaaaagcttgttttaagtacatttatgatgttgtgttggaccacaatcatggttatccttgggtatatgtggcccatggaccacaggttggacatgccagtgagggagttcttttggggaccagagggcaggtatgtgacttgtgacctaaattctcctcgaggttgcagtaggaagcaatggtggcatgactctgtagtaatggtggctaccattgttcagcagcagcaatgagtattgctgctaaatatttttttgtgtctgtgactttgatggtagctgttggcagcttcctgaccacttttgttcttgcccaatattgaggtctaaaactttggcctttcctgggattttgtaagtcactcagtaaaaacaaaataaagcaaatcaaatcaaagcaaagcaaacagccccaaacaatatgaaccacaaaagaacagcttttctttttatattaactaaagccatcgagcttttaacacagcatatgcatttagaaacatggactccagtgccaaattgacctccaaagacgtggcccaaattcccattccagttcagtggggcccacacattcagatttctgggtctttcctctagtgcaatctatgttgccttgcagtgatttgtttcttacccattctcctacattaagcctttaacctagagcctgacacatgtagtcatctatgtctactaaattaatgaatgaaaggaactgtttttaaagtgctcgaggcaggtcaaaggcagcatagtcggaattactaactgggaattgggaggatatctccactcaactccctattctgaagtgggagctagtgtccagaggaggtaagtgacttgaccaagagcataattaattggccaggttgaagcagctatcagagctgtgtttgccaggtctattagaagcctacctccaagtcctctgtgtaggagcctataaggactgctgcagctttcacaatgtttttgtcctatactttatgaccaaggggtagattttagctaaaatgatgtgcagagcagttggctcaaagctgtggagctgccagaaaatcaacctggaaaatggggaaggctggcaaccacccgtttggaaaattgcctttgtatgtgactggagggcatgcacatgtgcgtaaggatcaagcactctcctttccgtgctagatttttcatttcctttttttctttgtattgctttcaaatcaaagggaagccatggcagagagagaacctcttgccctgagctacatatatgaaaatgaaggaggttatgggacgggaatgttttcaataatggattggaggtatggccttttataggaaatgaagcgaaactgttactaagccgatgctgagggactgaggtgggatgggatgggggagggctactaatttcagtgaattgccccctcccccaagattcatttatgtacaaccaactggttggttaagaatcaattttagactgaatgggcagttgcttgtcctacttaaaggacttaattttttgacatttctattgccacagcttgatagaaaaatattcataaagtcaagtccgttttgaagagaacatctgtaaaattgggtcagcagatatgttagacgatggaatgaaggatgaaatacaaacctgtctggtctgtgctttatagcaacagggaagtgctttgtttccagggcgagcacttggattggagccttttggctctgatggctcggacctgccacataacccaggttcagaagcagccaaggggcaccactgccttcagccttggctttctgggcttagctccagctcagaggcagagacagcatgtggttcctcaaagaaaccactggaggccgctgtggcaccaagaactcaggaagggtgcccagctggtggcagagggtgtctctaaggaataatgactgtcacacacactgactgttcttgaattctagtccaggggtttaaagacactgttatgaattaacatgaataaaatattcggtagattaagcgaaggtcctggctctcctggggttgttttctaactgctaacatgctttatacccctctgggactgggtcctttttgcagcccagaggcataggttttatctatggtgaaaacgtcctccccaaatgacacaaaggttgctgctgcagcctgtagtatttatacttttgtaaaacaggatattatgctgtcttctctgtcagccattattggcagcaagtaccagccatcatgtggaccaaagaaacaagcttgcctgactgaatgttagacacctcattaatatgatttttagacgagcaacaaagaatttcttgatataatacatcctaaatgttgaatgagtcatacctacatagaataattctttatcttcgtttcaaatttatcttactatttagtattcttattgataaaacctgttctttttacacaggaagcatgtgtggctattgggagttgccctgggggaacttggagtcaagaccatcagagctgaagttaggcgtaggaggggagagggattgtgtgaaatggggactaggaggagggaggctgcgattgggatgtaaagaataaataaattgatgggaaaaaagacttctgttccaagatggatgtgtgtgtgtgtgtgtgtgtgtgtgtgtgtaacatgcgttggtgtatggtgcatgtatagaggatgacgagcaggagtctgggagtctgttttcttcttccactctaggatctgaggatgggactcaggtcgttagacttgagctttactcactgaaccatcttgctagccccacttcctttctttctttttggttatgctcttgccttaatgttacacaggtatgttggctttgggtgactttattttaaatcccactgaaatgcagggttcaaattcaactaatggccatgattcattggctctgagagacctgtgcataactcatggtattgttagaatacatgagactatgtgaactgacagattgtagcaaacctgaacaccagaacagttatcctgttgtaccatcaccctgattttgtctggtcctcaaccttgggtgtaccatctagagaatgagtagtgaggctgggatgggaacaagctctgggatgaggcgcttgttctcattcctggatgatttttccttcagtagtcatggccttatcaaagtgaacttagtgaactgcatggattttgtcggagaaggaatcaacttggaagtactagtttgaagcatctttgctgcccttctaacaaggtggcagattgaagacaggtgtgatagagctcaaatatttcctctcttaaagtgtaatgggtagttttaactgtcaacttgacaccacctggactcatttggggaagtaagtttctataggggattgtctggattaggtttgcctgtggccattgccctggttactttaattgatatgggaagactcagcctgagagtggctggcatgttccctgatttggggcctggcctgtctaagaaaggcagctgaatataaaagcatgcatgcattaatttattcgctcctgggtgtgatgtgagtatgtgcttcagatttctaccttggctttcctgcagtgagctagaacagaccctgtttgccctcagtcgctttttgtcagagtattttaccacagcaacagaaataaaactagaacaaaggctttgtgaactctcattgtttctcactaagcctgctgcctgggcagttttccatgtcttcctctcttgccaggctgcagctgtttaccatgcaagactgtaacatgcatggggtaggactgaatttgctaagactaaaggcagaccctgttcaaggcaccatctattaagccactcagggtagtgcagatagtgttgtcccaggggatagtctgaagaagtccagtttggccagagggcctgcagtagcttgtttggctactattaaccagcttgccatctcggtcaagtttatcttgtaaatccacttccctaaatcaatggcctccattagattggaactagagagaggctgcagcatctgtgagcactttggcaaatatttgaataagcttatgtgtgggatctcaggaggaagagcatcagttttgtgacgatttttttttttttttgccacttagccccagagccaactgagtgagagattttgaggtgtttcatcttgcccagaggtactcgttctctccttttctttaatctgttaatgtagagtacaacctatgcttggcccagccatgataggcttagaagcttaagagtaacctggggaaagatggactatcataagatctgggcctttggagtgacactccattttcagctttgatcactggaatactttggtggagggagatgggaggctgcatatattggatgagaaaatgcagtaagattgaatcaacatgtgtgtcaaaagagaatgagtagcctgagctacaaataatactaggaccctagctagtcatctcactgttttctgctatagagtatttatctgtgacatggtgtagcctcccccagccttgagcaggctggctcagacctgttctgctactgtgagctaggccacctagggtggagtcttctgacctagataggtctattgttctgccacttctgcggtttcctcctagacaccactacctgctgagaggttgaacctgttttccagacactatccctaggaaaagagttcttggtgtggtgggggatggggttcccccctctttaagctcagactcttaagtaaactttgggccttgatcagtatctttgtcctggtctcattatttctctcaccttttttctcccatgaagccccagcctccctttcaggaactcggtttgtgtagctgcaggcagctacaacatgtattctcttggagtcacgtgtgaaaacaagtaatttgagaggttgtactagttaggattcttcagagagacagaagcaataagaaacatattatttcacctatacacacacacacacacacacacacacacacacacacatcacagacatctatgacaattcatttgtgttaacaatttgcttatgtggtggtctgctgacagtgtcagactctctagggtggaggcttagaaagtttattgcagcttccatctaatggatctctgccttcagataacacagtctttttctcttaagagtttgaattcattgaatgattctcaaccacattatgagtggtactctgctttactaaaaaaaatagaatgatttaaataaaaatgaaaatgaaatgcaccttcatgaaaaagctaggtagatgtttgaccaaaagcttaagaatctatgacctagccaagatgacacacatgatggattattatggaagtgggctctgaaatacaaatagaagctgggcgtgctggtacacagatttttttaaataaataaattaatttattcagtttatatccctatcacagcacccctcccttctcaaagtcccatacttataaatctcccccactaccccattcctttcttctcagagaagggaaattcccccttgggtatcatcctaccctgggacatccaattgcagcaggaataagtatatcctctcccaatgaggcccaacaaggcagtagggaaagggaatctagtggcaggcaacagattcagagaagatccccacttcaattgttagggggcccacatgaagaccaagctgcacatctgctactaatatgtagggagcctaggtgcagctcctgtatgctctctggttggtggttcagtctctgtgagcccccatgggctcagcttagttgactctgtaggttttcttgtggtgtccttgacccctccagctcgctcagttctatctcccactcttccaaaagattccctgagctctgtctggcatttagctgtgggtctctgtcttagggttttactgctgtgaacagacaccatgaccaaggcaagtcttataaaaaacatttaattgaggctggcttacaggttcagaggttcagtatataatcatcaaggcaggagcatagcagtatccaagcaggcatggcacaggcagagctgagagttctacgtctgcacccaaaggctgctagttgaagactgacttccaggcaactagggtgaggatcttaagcccacacccacagtgacacacctattccaatcaggtcatacctattccaacaaggccacacctccaaatggtgccactccctggtccaagaaaatacaaaccatcacagtctttgtatctgtttccatccactgctggataaagtctctcaggagacagttgggctaggttcctgtctgaaagaacaacagagtatcattaatagtgtcaggggttgtcacatgagttgggtctcaatttgagccacttattggctggcgattccctcggtctccactccatctttatctctgcatatcttgtagacaaattttgggttgaaggttttgtggatgggtttatgtccccctctctatactggatgtcctgcctagctagctacaggaggtggccacttcagtctccatatcccctgctggtaggagtctcagatgtggtcccaaccatagactctacagagactccctacatccatggtttccagctagtcccagagatacccctactgatttcaattctcattcctagccctcttcaactcccctctctccttcactctccctccctcaatccccagcacccttcccctcttcaccctctcccatcatgttccctccctccattcacctccaatgactattttattttcccatctgaggtcacacatcctcccttgagccctccttattatttagtttcttgggtctgtagattatagcaagattattctgtactttatggctaatgttcacttataaatgagtgtataccatgggtatctttctgggtctgagttatctcactcaggatgacattttttagttccatccatttgcttgcaaatttcatgatgtttttgtttttattagccaagtcgtattctattgcatagatgtaccacattttctttatctgttcttcatttgaggcgtatccaggtttccagtttctggctattatgaataaagctgctatgaacatagttgagcaagtgtccctgtggtatagtggggcatcttttggtcatatgcccaggagtagtatagctagttcttggagtagaactattcctagttttctgagaaactgctaaattcatttctgaagtggttgtacaagtttgcactcccaccagcaatggaggagtgttctccttgctccacaaatttgcctcaagctgtcacttgagcttttgatcttagctcttctgatatgtgtaaggtggaatctcagggttattttgatatgcatttccctgatgactaagggtattgaacatttatttaagtgcttctcagccattagagaatcccctgttggaaattatgtttagctctgtacctcatttttaaaagggcttctcaccgtttttaaattaatttattaacatcccaattactgtactccctcccagtcccccatcacagggtccctcccccattcctttttttcctctgagaggatccccccatctcccggggtatttcccactctggttcatcaagtctctgtatggttaggtgcatcctctcacattgaggccagacaaggcagccctgttggcgaaaggattccacagacaggcagcagctttatggatagccctgctccagttgttggggtacccacatgaagactgaagctgcacatctgctgcatatgtgtcgggggcctcagtccagcccaggtatgctctttggttggtggctcagtctctgagagccccaagggtccaagttagttgtctctgttcgtcttcctgtggagttcccatccccttcaggacctgcaatccttccccaaactcttccctaagagttgccaaactctgtccaatgtttggctgtgagtctctgaatctgttttggtcagctactgagtggagggcagttcagatagactcctgtctgcaggcataacatagtatcattactagtgtcagggattggtgctcacccataggatggctgcaagttgggctgcttattggttggccattcctttggcctctgctccatctttgtccctgcatttttttgtagacaggacaaatttggggtcaaaatttttggctgggcagtggtggtacatgcctttaatcccagcacatgggagtcagaggcagggagatttctgagttcaaagccagcctggtctacagagtgagttccaggacagccagggctatacagagaaaccctgcctcgaaaaacaaaaacaagaacaaaaaaaaaaagttttgtaggaaagttgctgtccttattcctctgctggtgatcctgcctggctacaggaagtggactctttaggttccatatccctactggtattagtttcagccaaggttacctatgttgcctcctgagagcctccctctcccatcccagatctctgtgacttcctcgagattacccccactctcatacccccagcagctatagatttccattcattctcctggccctctggccctctcttctgtctctccacatacctgatcctgacccccaaattcacctccccatcccctctcccactcagtttcctccctattgtctacctcctatgactattttattcccccttctaagtgagattcaggcatcctcccttgggcctttcttcttgtttatcttctttgggtctgtggagtataatgtgggtatcctgtacttcatggctaatatatacttattagtgaatacataccatgcatgttcttttgggtctggattaactcactcagaatattttctagttacatccatttgcatgcaaaattcatgctgtccttgtttttagttttagctgaatagtagacagatgcagatattcacagccaaccattggactgatccaagaacccaatggaagagttgggggaaggattgaaggaactgaaggggagggtaaccccataggaagaacaacaatatcaactaaccagacccctcagagctcccagggactaagctaccaaccaaagagtatacactgaccagtctgtggcccctgctacatatgtagcagagaggactgccttgtctggcttcagtgggagggagtgcacttgccccagaaaagggggatgctaggggagtgaggtgggagtgggttggtgggtgggggagcaccttcttagaggcaaaggggggggggaaggagaggggtgcattgaggagggtttcaggaaggaggacaacatttgaaatgtaaataaataaaatgattagttaaaaaaaagaactcgttttctttatccattctttggctgagggacatctgggttgtttccagtttctagctattatgaacaaagctgctacaaacatagtagagcatgtgtccttgtggtatagtggagcatattttggatatatgcccaagagcagtatagctatgtctttacatataactattggcaatttttttgagaaaccgcctgattgatttacagagtggtttgtaccagtttgcagtacagccaacaatgaaggagtgttcctctttctccacatcctccccagcatgtactgttgcttgagtttttgatcttagccattctggttagtgtgcggtggaatctcagggtcgttttgatttgcatttccctgatgactaaggactatgaacatttctttaagtgcttctcggccattcaagattcctctgttgagaattctgtgtttagctctgtaccacattttttaaaatagttctcttttcttttctcttttcttttcttttctttttttttttttggtttttataatctaacttcttgagttctttatatattttgtatattagccctctattagatgtagggttagtgaaaatcttttcccaatttgtaggctgctgttttgtcttatttacagtgtcctttgccttacagaagctttgaaatttcaaggaatcccatttgtcaattgttgatcttagagcctgagccattggtgtaatgttcaggaaatttccctctgtgccagtgagttcatggctctttcccactttctcttctattagattcagtatatctggttttatgttgaagtccctgaaccatttggacttgagctttgtgcagggtgataaatttttatatacaagctggtaggcatagagtgaaatttctatgcaatccaggcagacgggaacttagatttgtaggtccaagtatttcacttctgcaatattctattatttcaagttagccaggactcaatgatatggcaggaagattctacctcttggttgcaaagtaggtgttaacaaaagttcatatttgtacattacctgcctaaggtaagggccttggcttctattccaagtgcatgtatatatatatatctatagtgttttaataagtacagccacatgatgatcacatgtgaacttttataaataaaatattttaattcattatttgagaattgaataatgcatgaaataggtttgattatgtttacccccactcttccccaagctgttcccagatcctttgcccacctctacatcttacaacttttccaactcctagccccatcctcctttcacgtttgtgtttttaaaaaaaaatccaccaagccccatttttatgggagtggggacatccattagagcattatagatctacctagaaccacacatttcaagaaaattattatcccttcttcagaggtcatcagttggcaatagctctaaagagcagcgtaagggatcatgaacccttccgcattctctgatgtaacaatgactggcctgatccagtacaggtctgcagcacatttgaatttgtgatagattctatttgtttaaagagtggaatataaaatgtatatgataaaatttataaaactatatataaactataaatataaatttgtttacagaatagaatataaaatggggaggagattgaggtgagtggacaaaagaccatgtaggaaaaatttcaagggtccaggctagacttgatgacaaaatggttgcagtgttaataggaaaaattagaggaaaacttttaagaagttaaatcattagttttacttcaatgcaaggaatgaaaaacaatactttatcttttgcatgcattttattttcccttctactcattctgttatccatgcatgtgttgaaaaacattagttgaacattgctttgactggtgttatcttttaagaattgttctggtacaatgagtcacaccaaacagtattttctcccagagagctgagtccaatggtaggacttggtcacattctacaacaactatgagccaatattttttcatgtatgaatatgaaagccagtgtttttcatgtatgaatatataccctttactgactgactcacttgatatatttaagagccctttggcctttgcacatctgtttattcaataagtagtttcagtggagacactgggccattggtatgtggtaaggagtgtcactactcaacactggcaagtccaaatgattcaggtctcttggactcttcattgctcagagacaacctcaaattaaaagtcccaaagtgcctctgagttatctcagtgatgtttctttttctattacagatattttgagcctcattgtttgtttgttttaatcatcacctccagctctccatgctttcctgtgatctcagacaccagattcctgaaaaaaaagctcttgttcaggccactgccatgatccacagggcacaggaaggtgccctctttcccttcttatttttccacacatgtgtgtgtgcatttgcgtgtgtgtgtgtgtgtgtgtgtgtgtgtgtgtgtagaggtcagaagagaatgttgcggttcctcaggagttgtttatagaacttatagataccatctctcactgtcttggagcttactagtatattaagctggctttcagcaagcttggagatcttcctatctctgccttctcagggttggccttaaaagattataccaccagacatggcattttgcaaagtgtgggtactgaagagtaaactgaggtcgctttgcttgcacagcaagagcttttactgactgagatggctccctgccttctgtttccactactttattccattaatctacagtgtgtcatatcttgagaaaagaacaaaggttcatcctcacagatagttgatttaagatcatttttcgtggcctcctagtgagaatgcgccccctttttaggaggcatggaccctagcttacccacagttgtttgtagtcctgtttactattcttcctcattgtctctactcagctctcctctccatccttctctaatacccttaaacttggagagttagaaattaatccttagtggtgcagttaagtaactagcagctcatagtatagtcaacccagtgaccctagggggaaagaattttttagtagatttttttctttcctttttaaagaggttggtactgcacatttcatttcacatgtcacaaatttgcatcttcaaaagctggaaaatgtcaacacttccgaaaagtaaagcacaaaatgtctggatgtctgcctactcagagtagttgtctcagagaacattgttatcctggacgaggtcagcattagacttcagagttcagacccaacgtaggggcgtcttcaatcttcttaactctatatatcataaaaacctggcagcacataccctgaattagggggctggtaaagctagaaacttgtttcaacagaaagtcaacagtgtttcactgtttcactggccaggagcttagcatcccactgtggtctaacaccttccccaaggcctttttctctagcacaggagtgttgggttaggagtcagcattccacaagtatttcctgagggcctctctctcaggcccctctcaacatgtgcattcatggccaggtcgtttatcctgcctgccaccttggactgatgaaaatgttactttgaattatggcttgagcacttccttagaaggccccggaccccaagtgagttctatccctaagttttcttcatggaaagattttcattgtttatagtctgtgattttggctggcagccaatgctgtagccaccaggaatgctttctcagtgggattgctcctgcaaacaccatcatgataaatatgcaatgttttatcagtctattcaccttcacagaaatgctttctttgaggggatggtggtgtggttttcaaatttatacttgtcctatgctcttaatagtcattcatgttttcatttcattatcatgagattagtgtgtaacttctttttggttcctaaggtaagatgaaggaagaaatgcaggtatttttgtgttgtgcacagctagctttctacaagaagtcctttgatttctgaatgatggaataatttcagtaggaattacttgtacaaaaaccacattactagtacaaaacccacaaagccatctatggggtgaggaattgattgctgacaaaagggtggttatttgactttgataacgtcttccttttaacagagggaaatagtaaaactcttctgacatttttagagatagcagaagtgatgctggttaacacaaagtaggcattgcattgttgcaaatgggggaagatgaaatgatgtcaaccaaggtcaccaggcactagttagaggtgatgcctggtagtagatagcatttatcaggaacattgcttggttaggttaccacattataaagagatgaattatttaaaactattggtgttctgaggcaaactgtcattaaataactttagcttgcctgatacttgtttggtggctcaggatgtccttaaactaatgacagcatttctgcctcagcctcataaatgctaggatatggactataacaccaagttgggaaacattttttaaccgattttgagccatgtgttatttggggtttccaagggatcccacatttaggtttacagtgccgtgtgctcacaggcatattcgatgtacttttatacatagagtttcagggagctcactgaatttataaaggccttagccctaaaagaaaatgtctcctgtgttaggaactatgtttatagggtcttgttcttagtggttacttctctgaggataccagaagtagggctatattcaagctgataatacacctgacagtgacgtataaggtgaaattggtaaaagaatttattgcagttttcccctcttttgaggagcaaaatacaaatgtacacatctcactatcccaagttccaggaaatagcatcatttctaaatgtcattcaaaggggtgggtggccatattttattttggtactgaggaagtttagtgtctgtctgtgtccttcagcaaagatctttctctttctctttctttctctttttctctttctctttctctttctctttctctttctctttctctttctctttctctttctctttccctttccctttccctttccctttccctttcccttcctttcccttcctttcccttcctttcccttcctttcccttcctttcccttcctttcccttcctttcccttcctttcccttcctttcccttcctttcccttcctttcccttcctttcccttcctttcccttcctttcccttcctttcccttccttccttccttccttcctttctttctttctttctttctttctttctttctttctttctttctttctttctttctttctttctttcttccttccttccttccttccttccttccttcctttctttctttctttcttttttttttttttttcgagacagggtttttctgtgtagccctggctgtcctggaactcactttgtagaccaggctggcctcaaactcagaaatctgtctgcctctgcttcccaagtgctgggattaaaggcgtgcaccaccaccacccagcagtttttcatagctccagacctaatgtttctttcccctagacagcactggacctacacaataacttagacatctttgaactctattttctgctcattagcttccattctcattaacatgttctttccttttcagctagagtgtctggctagtaagcttcaggtactatcttctctgtgtttctccagtgttgagtttatagatatatactgccacacccagcctttccccattctttctttctttctttctttctttctttctttctttctttctttctttctttctttctttctttctttctttctttctatcacaaatgctgtcccctcctggtcctcctcctagaattcctgcccctctcccctctccttcacatctgagagggcaacccctcttctgtatcctccctcctgggtctggggtatcaagtctctacaggattagatgcatcctctcccactgaggccagacaaggcagttccatgctatatatgtgccagggagcctcaaaccagcctgtgcatgttctttggttagtttctcagtctctgggagctctaaggggtccaggctagttgaaactattgttcttcctgtggagttcctctccccttcagggtcttcaatctttccctcaactcttccacaggggtctctgacctctgcccagtgtttgtctgtgggtgtctggatctgtctcagtcagctgctggatagagcctctcagagggctcctattctaggctcctatctgcaagcacaatatagcatcattaatagtgtaagggattggtgcctgcccatgggaagggtctcaaaatgggctaatcactggtcagccattcctttagtctccatctttgtccctgcatttcttttagacaggactaatttagggtaaaaaactttgtaggtaggttgatgtccccattcttctactcaggatcccatctggctactagatgtggtctcttcagattccatatccccactgttgggcattttggctaaggtcacccacattgactcctggaagcacaggcatgatagagaaaggagagaatcccaaagggccaggagaatgaatggatatatgtacttgtgtgggtcagggtgggggcattctctagggagttctggagactcagccagctttttatatgggtgcaagggatctgaactcagggtctcatgcttgcatgataagtcctttgcaaatgtgatcatcctctcagccacatttaattcactgtgtagcagtcatgtttgttttgtgtctcttctacccctgtagtagaactgtatgtgggcaaagtaggagaaatagtcaaggctggcaaatcaggtataagtcctgttaaagtattatagtcaaggaggctgcaagtcaccatttgtcccaacttagtaatacaaatgcttttaaaaaagtgtatttgtatttcagaccatgtttctagccacttaccaaaaccccatgtatttggtgggccctagtgggtccatatttgaagactgaaggtggttcacacaatggaatagcttagtacctacttcatggcccatgctctttttaaaacattggaatgtgaggtttacctcgtgactccaattgttattcactcatgtaacatcagatggcaaaaggacaccttcctaccatgatatgcaaatacaagtgctcttttctgagttgtaatggggaaaggttattttggaatgcaagggcatctggaaaaatctatactgcagcaatgtctgggaagggaactgcactcttgctttcattgactggtaggtgagtgggacatctggaaagatgataaagttcttagaacacttattactttcctgtcaaaagtttgacagttgagctgaggttgaatatttccaacaataagagctaatgttgtaaactaatgagtggtcttgggaaaggagcgtccatggcacagagcacagtccctgggccaatgccttctacacttattccttagactggccttacaccccataaatctgtcagtcatttcaaataaagattcggtttgtattgggcaaaccatttgcagcatttggtatgagctatttgccaagcattatgacaatgaagcctggaactcatattgaaataaggcatggtgatgaggttttatcttaactgattatttctttgctacctctaatgctgcacacctattaaaaatccagcgtcacatttccttcagtttagagaattgaagttgaatcttctcatttgggttgccatctggtgtgctactaacagtctcagagagtaagaggccatctgttaatactttttccaggaagctttttatagtgcagtgaagtggcaactctcaaaaacacattgtaatgacttacatgatcttagatatacatacaagttgaggctagtattttatttctatatacataactttttcccattgtggggacagaagaatcaagaaatatttgcatgcacaaaagcttctctctaatacataaagggccataaatgtatggactttatgatattaaaaaccaagattgtaagtacacactgagaaatgatgatgttggcagtcccaggtacttagcagaaaaccccatttatcattcttgctgcatgcctcagccaggttgcaagaattctgttcccagttattcttcataatgctggaccctttgtccttgctcgtgctaccatgactacagtggtaaatcctcctccctacttccttacatatctcatcagccaaaggaaggacttggccaaactaagaaggaaggttaaagttaacttcttcctattgtttgtgagatttcaacagtactctatgtattctcctaaaggggaagacccggaatgtgtgttctggcttctctgttacaaactgttttaaaatgttttatcatagaaagcaatcagtttcatcatggcatcttcatacatgtgtcactcactatactttttttctttttccttcctacattatcctcttctgtgaccctctcctgctgcttctgtgccctcccccaattaggccatgcatttattgcattatttctgtttcccaactaccttaaaaactccccatcacttctcataaaactagaaaagatcccttaacataacacacacacacacacacacacacacacacacacatacacacacacacacacacacacacacacacacacacaccccttgagaaattaatcaatcctatttgtcaattcttaggattgcttcctgtgctattggagtcaactcagaaaaaccactgactgtgtcaaagtgtatttctggttttctttcagagtcttacaatttaaaagtctcagtactattccctggtgctgtagtggctaggattcagcccttaacatgttttaggatctacattgagattgttgatccatgttgaatttttgtgtgtgtgtgtgtgtgtttgtggtaagcaatatgtgtctagttcagttagtaaacatgtggaaatcaagttttcccagcactattgtaggtttttgagactttgtctaaccaaggtgactgtaggtgtgtgggattatatatatctatatttcttatttctaattagctggtctactggtcttttttgtaccagtgccatgatgtttttgttgatatgattctagaatatagtttgagatcaaatactctgatacctccagcattgttctttctgctgaagattgctttggctaattgcagtcttttgtattttaagattgttggtttcagctctatgaagattatcgttggaattttaaaaagaaggtaatgttcatttattgtgtgttgggagtggaagtgggggagcatgccataaagtgagtgtagaggttggaggactactcatgggagttggttctctctaccctgtgggtactgggcatgcgtctcagctcatcaggcttggtggcaaatgccttaccctgctgaatcatcttgttgccctgtcattggaattttgatgggaattgtattgaatctgttaataacttgtagtcatagagttatttttgcaatgtgctgaatagttttatatcaatttgacataaactaagtcatgtgagagaagggaaccacatttaagaaaatgcttccataagatcaggttgtggacaggcctgtaagcaattttcttagtgattgatgtggcagggcacagcccattgtgggtggtgtcatccctgggctggtggttgtcctgggttctatgagaaagcaagctgaacaagttatgggaagcaagccagtaagcagcacccctccatggcgtctgcatcagctcttgcctccaggttcctgccctgcttgagttcctgtcctgacttcctttgattaagctgaataaagcctttcctccccaagttgcttttgtcatgtatttcgtcacagcaataacttaagctaagacatacaatattaattctgttagtccgtgtgcatagaggcttttccaacatttagtatcatgatttcttccttcagtgtcttaaagttttaatcgtaccagtttttttttgctttggttagacttatttctttctaggaattttagcttttgaagctattgtgaatgaggattttttccaatttcttccttggcatgcttgctattggtgtatggaaagtctaataatttttatatgatcattttttcccttaatctatttttaaaaacttttattgtttctttgtcaatttcacatcatacaccccagtcccattcatttccccatcccttcatccatatgcacctttgtaaacctccctccccaccaccaaaggaaaagaaaatctcattgtggaaactgcatcgtgtatcagggtgtcccacagtatatccttttgcctacaaggttttcttaatttattcactttacacccctatttctgtccccactccagtcacccctgccacagttccccctcccccttgccttcctctctgagagaatggaggcctcccttgggtatccctccaccctggcatatcaaatctctgtggagctaggcacttctgccactgaagccagacaaggcagtcaagctaggagaacatagcccatgaacaggcaacagctttagggtagcccttccccagttgtttggggcccacatgaagacaaagctgcacatctgctaaatgtatgcagtggaggtggcggggtgggggtggggtgggctagattcagatggcgtatgctctttagttggtggttcagactctgagaattgcaagggtccaggttagttggctctgttggttttcttgtggattttgatcccttttgtggtcagcaatccttcctcctattcttgcataagagtccccaagccccattcactgtttggatgtgggtgtctgtatctgagtcagctgatgggtgtagcctctcagaggacaacatgctcctgtttgcaagcataacagagtatcattaaaagtgttagggattggtgtttgcccaagggatgggtctcaagttgagtcagttattggttgtccaattagttcaggctctgctccatcccccatgcctgcatttcttgtaggcaggataaactttgggttgaaagttttgtgggtgggttggtgtccttatcactccactgggattcctgccttgctacaggagatagcctcttcatgttccatatccccaatgctgtgagtctcagctaaggtcacccccattgattcttggaagcctctctcatctcaggcctctggcatgtcctcgaggtacctccctcctgctagctgcagatatccattcattctcatggccatctggccatctcccttgtctgtctccatttgtgatcctgaacaccccctcccccaacacacacatagtccacacatctttacttgcaaatgttcattgtaatgagtcattggtctggtttgatgcttctggattctgctatattatcaatactggatcctcactgggactcctcttggaaattctattgtagtcctgtgtcatggagaccctgcagctttggatctgtggaactgaccctttcatgtgctccaggaattcatagatgggatagatgtttgagtgggccaactcaaagccctggatctgggcctgagaggtatttgagcttgtcaccccaccagcttcccagcatccacattaccatggtgagctctccagcacaaccctagctggttcacccagtactgctgtagtaaaaggcagagccagctctcctgctcttatgccctcggggaccactcacacttgcccacaccagcagggcaagctctattatgctgtccaggtaaggtacagggcttggtcttccatgtgctccagcctgctataggtgacaaggggtgggcagggctcccttatccatgctaccagatgttaataaaatttaagacttatccctaatatctcactgttatcacagaagtgtaatgcattgaatcctgacccttttatgtatatgagtatttatttgcatgtatgcatgttcaccaaatacatgcctagagctatggaggacagaaaaggacatggagtcctctggaactggagttatagatggttgtagccaccatgtgcattctgagtacaatgaaccagtctgcatgctatattgttttaagatttattttgctaaataaatccattagccattgctttttgaattgagcttcatgcctattctcgtgattcgggcacagtgtcatctgtgcatatgtgcatagtgaaagcccaaaccaaggacaagcttacagtcctaatgtatctcacattcagtggcaggttttggtaaaacagtgattccattcataaatgagtaaaggttggaggaaaattccatttgacatgctgtgcaatttggaggcatgaaattaaaaaaaaaaccacacacatctgtacagcaaagaaaactgcaaatgacaaggcagtctatagaatggaagaaaatatctaccacctattctttcagaggaccatcttgaatatacaaccccctaaataaagccaaaaccaaaacagcaaaacaacttgttaaaaataggtcaaaccattaataaaacttcttggtgacccccccccctcataatgaactctaggattgaatagaaagttttcaaaataagaaatagtaatggttaataacacttaaagaacttgttcagcatccttactcatcagagaaatccaaattaaaactattttgagagtccatcttactgcaatcagaatgattaacataaaaatatcaaatgaccgaccatacatgattattcactattgctataccagtcatctttacaaaaagaaaattagccttctgctatttttttcagttttccaaagctctttctgtatttctagcttttgagctaaatctagtttttattatgactttcactagatcacctacaggcaatctctagtctgtcatcttacctaaaagttcctgagtacatttcttatcagcgatttacagaagacacttgaaaacatcgtgcttattgaacacttgctaatctgagattatgataaattgtcctatattgcagttttgccttgactgtgccacagtatctttcaagtgcttttgtctaatatcattaactgcctttgtaggatcatgtattgtctttcctactcaacatttaacagattctactttgaatcagcagcatatgagcatagtatactgctagacaaaaatcactgcagtattcttttttcatccaattggcattgactccaaaatcacattgaattttcttatgttattatcaaagtatttaatgttttcagaatttcatatatgactactgtatttatatttcccctccccaactcctctcttgtcccctgctgctctgtcctctcaaatttatggcttctttttttattattttaaatagttaagattttaaacaatatatatactttatttttaattccctatcatatgaatttcatgaattttattttttataatttattttttaattaacattgcatcccaattaaattcccctccctcctttcctcccaatcccacccttacaaatccctccctccactgggcggtggtggcgcatgcctttaatcccagcacttgggaggcagaggtagtggatttctgagttcgaggccagcctgctctacagagtgagttccaggacagccagggctacacagagaaaccctgtctcaaaaaaagaaaaacaaacaaacaaaaaaccaaacaacaacaacaacaacaacaaaaaacccaaatcctttcctccactatcctctcccctactctcctcagagtaggtggggcctaccttgggtaccaccccaccctgggacatctagtcccagcaggactaggtgcatcctcttttgttgaggtacaactaagcagtccagataggggaaggggatccaatggcaggcaacagagtcagagacagactccactccaattgtcagggatcctatgtgaagaccaaactgcacatctgctaaatttgtggggggttaggtccaacccctgcatcttctttggttgatgacttagtctttgtgagcccccatagaaattactgtttcacacacatgtacacacacacacacacacacacacacacacacacacacacacaaacacacacaatttggtattggttgatatttatgggacagtttctggagaagactgtttctctctcagcagctattccctgtagctctttatttaggggtggggctttgtgaggtttgcctcatccacattggcttgtcaactgatattgtccttatgtaggccttgcttaggtaaccatattgttgagatctcatgtccacagcctccctgtcatatctagaaggcacagactcctagtcttatggctcttagaatctttctgcgatctctttcatgatgctctctgagctttctgtataggggttgtggtgtaggtgtatcattaagcaatttctaatctgagataatatcaactgccctatgttatagttttcttttctgtgtcctacagtatctttccattgcctttgtctaatgtcattaatactgggcacccacagttagttgatttctgaatttagcgagttgtggatttctgtaatggtctccattttttctacaaaaagaggcttcttagatgaggagtaagagctacacttacttatctctgagtgtaagggtaaatatttagaatgaagttagaaagtatactagtttagaaaagtggcaatagtaggattttctgtaagtcaatggttctcaagctgtggcttgcgacccctttcataggggtttctaaaaaccattggaaaacacacataatttacattgtgattcacaacagtagcaatatggttggaggggggggggtcaccacaacatgaggagctatattaaagagtcacagtattagggagtttcaatggttactgctttaggttctgtggcctttccaaccataggtagttcatatacacatgtgtgtatcctctctctctctctctctctctctctctctctctctctctctctctctctctctcctgagataatgagattccctatgacttttatagagatccatagtactatttatcccttcctcaacctctatattgctgcctgttcacctgcagttaaaattgtctcgtcccatttttatcactttcccccttcatagtcttactatttccctcctgaaaacatctaaaccttaagagctatgttccacaaataagagaaaacatatgttgtttgtctttctgtgtctgggttaacacaaggttcagtaatttttaaacagttcaatagaatcctattgtgtatgtgtaccatgttttcattatccatttatcatgagaaggatgattacagtatttccatttcctagctatcagggctagagttgcaatgaccatggctgagtaagcatgtgtagagtaggatgttgcatcctttgggaacatatatgctgagaattgtttagctgggtcagatgacagatttagtttttgcttttgagaattctctatactgatttccatagtgacaagggagatagtcactcttggtggtgcagctacagaacactgtagaaatctcaacatcaatgagcatttgttgtcagttttcttgatcttagcctttttcactggggtaagaggacatgtcaaagtagtttaatctgtatttccctaattactaaagatgctttaataccttgtgagatatttattagacatttttattcttcctttggaaactctgttcagatccactccatttttaaaattgtgttgcttgtgttcttggttctgtttttaaagttctttatatattctgcaaattgatcttctgtcaggtgaataggtggcaaagattctctgtgactctctgggcttcctgtccactcaatgattgtttccttttctgtaacaagctttttagttttatgaagttcaatttatcaattcttggttgtaattcctggacaaatagagtcctattcacagcgtcctttcctatactcatatattgtaaagtaacaatatgcttttttctagcagaatcagtatttcaggtttcatattgatgtatttaattcagcaggaactgacttttgtccagggcaatagatatgagtctaatatgcttctatgttatcttttctctggtatatttttgttgatgttgttttccatctttgccaagttccagatagcttatattctatgtttgaatcttctatttgtttcattgatctacctgtctgtttttctgctagtatcaagctatttttattagtatagctttgtaaaatattgtaaagtctggattggtgatctctctctctcttacaatcttctctttgttcaggattgctttgttcttgatctttgtgtttctctgtgaattttatgatttttttctatttctttgaaaaatagaatgggaatttgattgggattgcattgaacatggcaacattgtcattttggcagaatggttattttcacaaattaattctaccatccatgagcatgggatgcttttccacatcttcaaccatccatgagcatgggatgcttttccacatcttcttcaatctgtttcttaaaaatgtaaagtttccattctagaggtctttaacatccttggtaggatatttctatatattttgatttttttaaaatttgggttactttgaatgggactgttttcatgatattgttctcagtatgttatcggtatatagaaaggctactgattgttgtacattaattttgtatcttatcactttgctcaaaatattgatcatttctagaaggtttctggtggaaattttaggatattttatgtataatattatctgtaaatagggatactttgatttcttttcctatttatttctctttaatttctatatcttaccatgctagctagtgtttcaagcactatattgaaaatgaatgaggatagtagccctgccctgtctcaggagattttagtgttattaccttgagttttgaggatgatgttggctgtggatttatcgtacataacctttattaggtaggggtatatttgctttaatcatacactctagaacctgaaagcatgttggcctttgtcaaaggtctttgtacatctatggagatgatcatgcagttttcatctttaagtctatttatatatgatttattatatcttgagttacatatattgaaacattccagaatcacaggaataaaatgaatgtgttcgtggtacatacttatattcagcttgtaaatatttttgtggggatcattgcatctgtgttcatgatgtatgttgcctgtactttttgttgttttgtctttacctgcttttgagattgagtaatgctgggtttctagaaggagtttcatgatttaagcaacattggttataataacaaataattaaaaagagtccatgaatttgaaggagagcagggagaggtacaggggagtatgtagagggaggaaagagagaaatgttgtaattaagttataatctcaaaagtaaaataaaaggaaaaaaaaaaaagaaagaatgattttagattgacaaccagaaagggaaaaacagtctttgaaaatctggtagaattctgttgtcaatctatctgagctacacctccctgtctccgttgttatgggattctataaattggtaatctcttttgatttaattttggtggcttggatgaatctagaaatttgtttatttctcagattttaccacttagtgtaatacagttttttaaagtgttcccttaaaatcgtattgctttgatatcagtttcagagacccttcttccatggagtagaatatatattccttggtatttgggtgaaatattctgtagctatctgttaagtccttttggtgtatgatttagctctgcggttttttgtttgtgttttgtccagatgacctgtctattggagaaagtgtggttttgaaatcacctactattaatagattactgttaatctgtgtctttaaatcgaatagtatataatttatgtgccagagtttggtgatgtaaagtaaacatttattgtactttactaaacctccaacagttatagtgtttaacaaggtcttctctatggacaaaatgtttgaatttattaagcatgtagtgagcaaaagaacaaatagcaagaaccagacagattttagtattgtattttcttcttggttaatttttactatgattagaatggagtatttttatttcttcttatttcaattggaagtctattttatcatgttaggatagcaatgcttgctttgtttgctgttcctgcttgcttggaataactttttccatccttttcttgtaaggtacatgaggttcttttagaaaacagacagatgaattttttttttgatctgttcaactaacctgtgtcttttgattgaggacataagagcattaatattgaacattattgacagatttattttgattactgttatttttctgtgttttgttatagcttaatttttatttttattgtctcttggctattcttagtcttctcttcaatttgaagtattgcttcctactatatttattactactactactactactactattattattattattattattatctggggctggtttgttggacatggaatcttttcacctgtttatgtcatggagaggttatgttttatgtatttttttctctttcaactatgacaagtagttttgatgagtatagtagttcaggttggggtttggatgacccactaatcctgtgagagtcagaaaagcaataaaggtccaagcatattaaaaaaacattgagttcttgagaatagctagaagataatctatttccatcagacattactactattctttatcccactgtgtgatggtttgtatgtgcttggcccagggagtggcactattagaaggtatggccctgttggaatatgtgtggccttgttggagtaggtgtgtcactgaggtgtgggatttaacaccctcatcctagctgcctggaagccagtattctgctgacagcattcagatgaagatgtagaattctcagttcttcctgtaccatgcctgcctggatgctgccatgctccctccttgatgatagtggactgaacctctgaacttgtgagccagctccaattaaatgttggccttataagatttgccttggtcatggtgtctgttcacagcagtaaaaccctaagacacatggtgtaaaaatgtcagggatgggaactaggagccagaagctccttggtggaaaaactcttagtttggaacccccagcttgatggctgcttctatagtcaatttctgctggacattttaaatcctgatttgatgatgtcatttttgtaccctcaatcagactgctgtagtcacctatgctgggtgttataatttctgatttgatgatgattactatctatttctacttctagctctctggcacttgctatctgattttttttgctcactgcatgcttaataagctcactcatttgaaataaaaatatgactatcatagagcattctcccaaccatacagaacatcttgttaaactgtatgactgttggaagtttggtaaactaagcaatgcatgtttattttactttacattattttcatttgttttcttttacatttgttgtttgtttttaggattacatataaaagtaatatatattatcttactccatttgtactgttctaacagaatatgatatggtgtttaatttatgaaaattcagcatttattttctaacaattatggagtttggaaagtccatgatcaagatgttaatatctcactggctggggatgtgactcagtaggttgagtgcttgccgtggaagcatgaggatgtgagttcagattccaagcacccacataaaacctgggtgtggcagtgagtgcttataactccggaactggggagcgcagagacaagaggattctgtggcttgctggcctgccagtcttggtgaaacagcaagctctaggttcaatgagaaacatgattttcttgtagagggtggagggatgcatttaaaccatagcacatatttattgctgagaatttggtaaatacagcaaaatcagtaaaaaggaaaattactgataatcattagtgagcatttattaaaataacattaacttttaacatattataaataatttttaattatttttctgttttgtccatgtcactcatccagtcaatggactattatatgctacagtggcaaccagtaagtttctacaaggtacttattaaaattcataattatatatttttgtatttaatatttaatacatctgctacacaggactaaatggcatgaaaagaggtttgaattttagttcacagttgtgtccccagaacctattgcttgacataatgaatgccccatcaacatttatttaataaaagaatgaaacacacacacacacacacacatacacacacacatatagagtttcaaaccacataatttgattttcttttgttaaaatgccacactatttcaatttaagtagtccttaatattttattttagcaagtttccagcacactaaaacatactttctttcctagttgtggtagcatatacctataattccaacactttggagggagagacaggagagcatttagaattcaatactatagaaagtttaagtccagctgggcttcatgcgaccctgactcaattcccctttccaaatagttgttttgaaataagtcaagtggtgtgtgtgtgtgtgtgtgtgtgtgtatttgtaaaagtaacattgtacttagcaactcttatagcaggcagtcctctgctgtatatgtgtcaggtgcctcatatcagctggtgtattctgcctggttgctcagagtctgagagatctcaggggtccaggttagttgagactgctagtattgctatggggtcaccctcctcctcagcttcttctggcctttccctaattcaaccacagggatccctgacttctgtccactgggtgtaaatatctgcaactgaccctttcagctgcttgttgaacatctcagagggcagtcatgctaggttcctgtctacaaccataccacagcatcagtaacagtgtcagggtccttggtgcccccttgagttggatcccaatttgggcctgtctctggacctcctttccctcagtctcttctccatttttgtccctgcagttctttcagacaggaacaattatgagtcagagttttgactgtgggatggcaaccccatccctccactgatgtcctgtctttctgctggaggtgggctctacaagttccccctccccactgtagtgcatttcatctaaggtccatccctttgagtcttgagattctctcacctcccaggtgtctggtacattctggagggtccccccacctcccaccttttgaggtttgcctgtttccattctttctgctggcccccagggcttcactcctgttcccctccaatatctgaccatggtcgcccctttccctccatgttccctctcctacccatttccctccctccctctgctctccctatgattgctttcttctccctcccaagtgggattgagccatcctcacttgggtccttcagcttgttaaccttcttgagtcctttggttttgtgctgggtattctgtatgtttttggctaatatccacttattagtaagtacataccacgtatgtcctttttgggtctgagttacctcactcaggatgatattttctagttccatccatttgcctgcagaacttacaatgtcctcattcttaatagctgagtagtattccattgtgtgactgaaccacattttctgtatccaatcttctgttctggatctctcagttgtttccagcttctggctatcacaaataagcccactacgaacatagtggaacacgtgcccctgtggcatggtgggcatcatttgattatatgtccaagagtggaatagttgggtcttcagatatatctatttccaattttctgaggaacctccagattgatttcccgagtggttgtaccagattgcaatcccaacaacaatggaggagtaagaacccagcatttttaatactgcttaatctcttttttcctcactctttaaatatctgtggatagattatgcaaagttggtataatacagaacatgaaatttattcttaaacagacatgatagaatacatatgagatttaatataattgatactatgaaaattggaccattataggaattttttcatcagcacaattttgatttaagaaagccctgtttttaagtggatgctcacagtcatctataagatggaactcagggcccccaatggagaagctagagaaagcacccaaggagctgaaggagtctgcaaccctataggtggaacaacaatatgaactaaccagtacccccagagctcatatctatagccgcatatgtagcagaagatggcctagtcggccatcactgggaagagaggccccttggtattgcaaactttatatgccccagtacaggggaatgtcagggccaagaagcgggagtgggtgggtaggggagcaaggtggagggagggtatagggaactttcaggatagcatttgaaatgtatataaagaaaatatatataaaaagaaaatatctaataaataaataaataaataaataaaaagtaagccctgtttttggtacttgcataaagttttatagtgaaaatcaaggttatttaatttttgctagttccatccacttgactggaaaactcatgatgtcctcatttttaatggctgaatagtattccattgtgtaaacgaaccacactttctgtatccatttttctatatatttttgatattcaaataattacagatttttaataattcaccaaatattgctgtgagttctcaggggtccttcattcagctccctcaaatgttgtgtgtgtgtgtgtgtgtttgtgtgtgtgtgtttctgtgcacacttgtgcatacatgagactttcattttaatccaggttgttcttgaactcataacccttcagttccattttcctaaaagttgggattataagcatattccacaatacctggctcaaactttaagattctagcatgagtatcaaaatcaggaaattccattgataaaatactattaatgattttataaactgtggtggcttgaataagtatggcccccataggctcatatgtttgaatgttagtcaccaggttgtgccattaattgagaaagattgggaggtgtggccttgttgtcgaaggaagtgtgtcactggaggtgagctttgaaaattcaaaatcctgtatcaaaccccagaatctctctctgtgtatgtctctctgtttctctttctccctgtctcattctgtctctgcttgtggatctgaatgtagctctcagctacttcttcagcaccatgtctgtgtgcttccatgcttcctgccgtgatgataatggactaaactctgaagctgtaagccagccccaattaaatactttcctatataagagtagatatctctttacagcaatataataatgactaagacataatgtaatacagattttgttaattaactaacagtttttgtagtttagttctgtgattcaaccccatgttctcatattgtatttatatttaatagctctttaagttcttgtaatttgagacagttcctttaatctttagtttcagtaattttaaacttttgagaccatcacttctagatcaccatgaggttcttttaggtcttcttacttctcaggggggggtctcataagtagataactttccttttttcttctcttctatcttttccttttgagtgatggctagagcacaagtatggtatgttcctgagattcagtttatgtttgtgtattggccgtttattttgtaaattattttgttattcaaattgagttcaagttttcattttgatggaattctgagtttatatttctgccagtaaccatagagatgttgcgcctatcacagatcattttatcataaagtatacaatgttgctatgtttcagaattgaagatggcaaactgtcaatatttttgccagctttctttactggagaggcactatttttatttgttatctgtaagtatcttatgaggatatatattttaggatgattaaacatcttctaatcatacttttattcactaatttttttgatttttaaaacaatcaccataatatttgatggataatgatctttctgccatcatctcttctatgtttattgagagatctttcttgttttctacatttattttattaagttaaaatctataatgatgactgtggtactaaataacctagttgctatataacaaaggatcattcaatctatgacttttagccttcaatactgtgagctaaataaaccattttctttagggatttctcagatatgtccttatatctgtagaaaatgtactagtataatatcattgttttgtcttttgtattgtcttttcccataaatctataaatctataaatcataagcaatcatttaattatcctgtgtagcaggataggtatgtgatgtagacactaaggttataaatactggcatctggcaataaacatctgaacaggttttatatatatatatatatatatataggaatgtgtgtgtgtataacaattaagtcatgaatttaactgcaggggtggtatctatgggaggtattgaaggaaggaaagggaaaaaaagtgatgtaattatattataatttcaaaacataaaaagttatataaaaccagacacttggtaggtagtactaacattttattaattagtgtatttgtgctatataaacatttttactttgttttaaaataagcatccatttatatccctttggtagagcctgagctgctataataagctcttatgttaatgagttgctaattttgccacttactatagactatcagcctagtgtcatttgcagagaggctctttgaacttgtacaatgggttgaatttcaaagtacatgcacactgtctgttggaccttgaaaataacctgatgaagaccaagacagagcaggagtttgggaagctccgcaaggagcatgtgcgactgacgtcaagttagagattgataattttatgaaggatatacaggagaatacaagcccttgcattccctcacagagagtgcttgaagctctcaaatcttacttgctttttttttttcttacctgcttttaatttgatgtatatgaagctggattattcttggaggttcatctggccttgaagcaacaatgtttcttccaaactcacccaatcagaaaagatccagtcaagatccagaaactgagctatgcacagcctttgaacattcctctttatcttgttttgattgtctcttactatagctctgactgtctgactggcttcaaaattgctattgcagtccaagttgccttgaacttataacacagttgctcctatttttcaagtactaggtaggattgctagcatgggtgatatatatgagctgcatcatttatactcaatttgtatgctagttatgttttatgttatgagcacatatctaagaaacacaactgaaaataaggagatttactttgaatcatggttctagagatttccatttgtgatgatatggtagcattgtttctggacttgtgataggaaaacctgattagtatgctcatctcatgactgctagaaagagtaggaggcaaggtaggagagaggagaaaaagtggcagccttcaaaggcatgcctttggcattctaattcttgtaatgtggtcctgtctcttagaatttccaccaccttgcagaccaagatctgaatctgagcttttgctacatattaagatccaaatcttcataacaagcaactattgccgggtgtggtggcgcacacatttaatcccagcactcgggagggaggcagaggcaggcagatttctgagttccaggccagcctggtctacaaagtgagttccaggacagccaggggtatacagagaaatcccgtctcaaaaaaaccaaaccaaaccaaaccaaaacaaaacaaaaacaagcaactatttcctgatgtcctcttcagtacttcccatacagctggacacacaataaacagctacaatttatttaccacctactttagaatcctcatagaaaagcaaatgacacctgtcctatttagtgtttttattgctgcattaaaaaacttttgggatagcattggaaatgtaattgaggaaaatacgtaataaatttaaaaaatgtaaaaaaataaatattcagttgatagagtattaaaaaaaaacaccatgatcaaaatagcaagttggggaagaatgggtttattcagcttacacttcaatattgatgttcatcaccaaaggaagtcaggacaggaagttaagtagggctggaacttggaggcaggagctgatttagaggccaaggaggggtgctgcttacttagtagtttgctcagcctgctttctcaaagaactcaggactaccagcccagggatggtatcacctacaatgagctgggccctcccatattaatcagtaactgagaaaatgattttcagctggatctcatgaaggtatttcattaactgagactccttccactctgttaactctagcttgtgtcaagtttacagaaaaccaactagtatagcacccacttcagaagccacacagaggattaaagaatttgcataagccacttaacatagtgaatagctattatgagactgattttataaaggaagaaatagagggcacaaaaggcaatgaatttatcagaagtcaatggggcagataatagagctgagattcaagtgaatttgatcaggctcagagcccatgatgtctccaatgtcccaagctagagggaggtgagattgcctatgtgaaggaaagaaatccttaaatgttgtccactctatgaacacactaagctccttatttagcttcattattttctaattaatatggtaatactcatatcgaatagaggtgattataattaagttttagagaaaagttagagcaagcagggcagaggaaaagaaatggagaagtaaggtggctgaacttttattgtcttatccatcatgtgcctgtttttcaaattaaacattctaaattctttcattagtgtccatctaggtagttgtgactacttggaaaatgtgcaaagggttttgttcattgtgaagtgatttttttttcattgtgacttactgtaattgccaagaatgagatctgttaaaatgattacagggaatgattgcctgtctttgcctaatgccacacagtagaattcaggaccaacttgagatgttgacatggctctagcctgatgtgtgggtcagtggttctcctgtgtgggctttaaaggcaggcttcggcttccttttagaacatagtattattttataattactatgctcatggaaagtccaaggtatctcagccaccataggggattttctgctttttatttgttgaagttagatttgttttataaaaatcacttttttacaaagaatttgaaagttaaaaacatcatgaaactcaataaatatagcaactcaaacaaacacttgtgcagaccccaaacttaatgtctcaaactcctctacagttagaagagccattcttcagttgtggaactttaatttgcagtttatactttcactatcagttatagttcacatatttaatcactacagaaaggtgaaaaattcacaagagttaaaactcgaaaaaaaacatttagcctttatcttctttcaagatttgtgtgtcctttgtctacatccttccttgtcactcaatataatccttttattcttatccattctgcatgttatactgtacccacatgcacatttgtgtgtttcaactcctgtaggggattgtgatttccagggaggtacatgtctcgtgcttttaatatgtaaaaccaagtcacacagtatgttagtggcagatctgggccatgaacccggttttctaacttctgtgagaaagctgaacttcagctaaccttactagaaatgttgaaggatgtgattaatcaaatgtgctaggtaaactgtcagtggaaactggaggaggtactgataaggaattataaagaacaaatgtcagagtacgcctgacaattaggtaaaacagcttcggagcaactactgtcaaggtaactactgatgtgaggtgaatatctgctgcttcttgaggagaaaatgatgtggaacagccagccatagctttaacttatatgactgagctgcaaatccactgtagctttgtagctactcgatagctacccatgtgcgtgcatttacctgtttagtgttataatcagctaatcctacacttagaaactggaaagttcttttgggtgttgtatttttcatcactcttacaatactttcaagacagatcattacactgtagcctttttacttcttgcctgtttgctgttatgaaccagggaatttgttgggtaatattatgtggttgaaagaaaacaaactgaaacacattctagctaatgaccccaaattccgttttacatgaactcatagtgataatattggtttatttgggtgtctataattccttggtcacccatgcctcaaatgaatgcatgttgtgacaaacaaaacaaaacaaaacaaaacaaaaaccaaaaaccaaaaaacaaaacgtattcactaatgaacccatgaatgttgtgttttcttgaaatatgagccccaagccgggtgtggtggtgcacacatgtaattacagcatttgggaggcagaggcaggcagatatctgtgttcaaggcctgtctaaactacagagctagttccaagacagccaggactatgcagagaaaccatgcttcaaaatccaaaaaccaaagagggaaaaaggaaaagaaatataagctcagatatatgtttctttctttttttttattacgtattttcttcaattacatttccaatgctatcccaaaagtcccccccactcccctacccacccattcccattttttggccctggcattcccctgtactggggcatataacgtttgcctgaccaatgggcctctctttccagtgatggccaactaggtcatcttttgatacatatgcaactagagtcaagagctctggggtactggttagttcataatgttgttcctccgataggatctctttagctccttggatactttctctagctcctccattggcaccctgtgatccatccaatagttgactgtgagcatacacttctgtgtttgctaggccccggcctagtctcacaagggacagctatatcaccgtccttgcaacaaaggcttgctagtgtatgcaatggtatcatcacttggaggctaattatgggatggatccctggatatggcagtctctagatggaccatccttttgtctcagctccaaactttgtctctgtaactccttccatgggtgattgtttccaattctaagaatgagcaaagtgtccacactttggtcttcgttcttcttcagtttcatatgttttacatattgtaccttatatctcgctatactaagtttctgggttaatatccacttatcagtgagtacatttcatttgagttcttttgtgattgggttacctcactcaggatgacgccctccaggtccatccatttggttaggaatttcgtgaattcattctttttaatagctgagtagtactccattgtgtagatgtaccacatttttttgtatccattcctctgttgagggacatctgggttctttccagcttctgactattataaataaggctgctatgaacatagtggagcatgtgtccttcttaccggttgggacatcttctggatatatgcccaggagaggtattgcgggatcctccggtagtactatgtccaattttctgaggaaccgccagactgatttccagagtggttgtacaagcttgcaatcccaccaacaatggaggagtgttcctctttctccacatcctcgccagcatctgctgtcacctgaatttttgatcttagccattctgactggtgtgagatggaatctcagggttgttttgatttgcattttcctgatgattaaggatgttgaacattttttcaggtgtttctcagcctttcggtattcctcaggtgagaattctttgttcagctctgagccccatcttttaagggggctatttgatttcctggagtccaccctcttgagttctttatatatattggatattagtcccctatctgatttaagataggtaaagatcctttcccaatctgttggtggtctttttgtcttacgctggacaagaaaattgaattttacttgaagttaatcattgtcaatttatgttgaaatcttagaatgggtagattatcatggattatctgtgcaggcaataaatgtaagcatatttgcctaaagcagtggtggctctcaaccttcctaattctgagaccctgtaatccagttcctcatgttgtggtaaccccaaaccataaaattacttcatttctatgtcataagtataattttgttgctgttataaacaatgtaaatatctgtgttttccaatggacttttgggggtcatgacccaagttgagaaccagtgacctaaaagtgccacgcactctggtcgagtcagcttgacaggccgagaggcctggaagccactcacgaggcagagagtttcatggaaactcacctcctggagtttggcattctcatcaaccacatactcataccctatccccgagttagtctgggatatggatccacgtgctctcttttagtattatcttattataagtgccttttaagattgaattctgacatagctaagccttcaccagtgttccgaagtcctagaaagtccttgagcagaccatgggcttggaattcagtaagaatgttgcctattcagtgacattcagaattgcctctggtattacactatcactttgaataaaagctaagtcactgccctacacaggaatttaccatcatctaggaagaaggaagtttgagacctaaggaggaaccagagtagatacttagaaatataggtagctgagttacacccatacacatgtacttacaatggcctagggggaagatggactatacaatagagtaaaataggaactatggcaagggcacgaagcccttgaccctggcttctaagattaagtggaccttaggtggagctctttttgatcccagttgttaacaatgaattctatcccaggtggttcctgtcagaccttctgtgtttgtattcctctgttttgtgtaagaatccagtaacctctttgtaccttgctggtgtgtcacccaacttccctattttcttctgtataaaaagtttgatgcttgatttgacaaattacattcagattctacacaatctctcgtgttggtctgtctgccattccctccgacgctttgcccacctgccccagagacccgttccatccagacaaagggatccagagggtctgcggcataaaagaaaggtgagagagggaagggaagatcaagagaggggaagtgaagatgaacagaaagtgttgaggatacatggttttgaggaaaagagtgacctagccaaaagccaaggaatgttgctatccatcagagactcaaagaaacaaggaatgtaattctatcttgggaactagaaagtattatcctgagttaggtaacccaatcacaaagaacacacatggtatgcactctctgataagtggatattagcccagaagctcagaatacccaagatacaatttacagaggtggatgttctcagccaaacattggactgagcacagggtccccaatggaggagctggagaaaggacccaaggaactgaaggggtttgcagtcccataggaggaacaacaatatgaaccaaccagtgttcccagagctctcagggaataaaccaccaactaaagagggactcatggctccagctgcatatgtagcagaggatttcctttccttcagtctctgctccttccatgtgtatcttgtccccccttctaagagggactgaagtaaacaaactttggtcttcagcttgtcgagctttttgagttctgtggactgtatcttggatattctgtatgagggtttttttgttgtttgtttgtttgttttttttttttttggctaatatcgacttattattgaatacataccatgtatgtccttttgggtctgagttacttcactcagaatgatattttctagttccatccagttgcctgcaaaacttatgatgtcctcaatcttttttattagatattttctttatttacatttcaaatgttatcccctttcctagtttctcctctgaaaatcccctttcccctccccctctcccactgctccccaacccacccactcccattcctgatcctggcattcccctatactggggcatagagccttcacaggaccaagggcctctcctcccattgatgactgactaggccatcttctgctacatatacagctagagccacaagttccaccatgtgtttcctttgattggtggtagagttccaaggagctttgggggtattggttagttcatattgatggtcctcctatgaggcttcagaccccttcagctccttgggtactttctctagctccttcactggggaccttgtgctctgtccaatggatgattgtgagcatccatttctgtatttgttgggcactgacaaaggtccacaggagagagcaatatcaggctcttgtcagcaggcttttgttggcatctgcctagtgtctgggttttgtggttgtttatgggatggatccccaagtggggtagtctctagatggtcattccttcagtcaccgctccgaacgttgtctctgtaactccttccatgggtattttgttcccccttctaaaaaaggattctgaacttctgggttccacttatcagtgagtgcatatcatgtgtgtccttttgtgattgggttacctcactccagatgatatcctctagagccatccatttgtctaagaattttataaattcattgttcttaatagctgagtagtactccattgtgtaaatgtaccacattttctgtattcattcctctgttgagggacatctgggttccttccagcttctggctggaaggctgcttaatagctgagtagtattccattgtgtgagtgaaccacatttcctgtatccattcttctgttctgggatatctgtttttttttttcttccagcttcaggctatcacaaataaggccattacgaacatagtgaacatgtgcccctgtggcatggtggggcatcttttgagtgtattcccaagagtgatatagctgggttttcaggtagatctatttcaattttctgaggaacctccagattgatttccagagtggttgtaccagtttgcaatcccaccagcaatggaggagtgttcctctttctccacatcctctccaacatgtgctgtcacctgaggttttgatcttagccattctgattggtgtaaggtggaatctcagggtcattttgatttgcatttctccgatcactaagtactttgaacatttctttgggtgcttctcagccatttgagattcctcagttgtgaattttgggtttaattatattgggaactagaaaatatcatcctgagtgacataacccaatcacaaaagaacacacatggtatgcactcactgataagtgaatattagcccagaaatatatatatatatatatatatatatatatatatatatatatatatatattttttaatactagccctctatcggatgtggggttagtgaagtttttcccccaatctgtaggttgccaatttgtcttattgactatgtcctttgccttacagaagctttccagtttcatgaggtcccatttatcaattgttgatcttagagaatgagccattggaattatgtttaagaaatttccccctgtgccaatgagttcaaggctgtttccaaggactcaaagggagggaccttagatgaaatggtctgacagtagggagagggaacttatagagcccacctccagaaggaagacaggacatcaagtgagggatggggttcccatcaacagtcactcctttgacccataattgttcctgtctgaaagaattacagggatggaaatggagaggagcctgaggaaaagaaggtccagcaacaggcccaaagtgggatccagctcaaggggaggtcccgaggcctgacactattactaaggctatggagagcttacaaaaagggacctagcatgaccgcactccagaaggcccaacaagcagccgaaagagtcagatgcagctatctgcactcaaccaatgggcagaagcagctgacccctgttgttgacttagggaaggctgaaagaagctgaggagaagggtgaccctgtaggaggaccagtagcctcaattgatctggacccctgagatctctcaaacactggaccaccaaacagacagctgatatgaggccaccaacacacatacagtagaagacttttgggtctgtgtttattcgaaaatgatgctcctaacccttaagagactggaggccccagggagtttaaaagtcaggtggggtggggggtaggggcatccacatggttatggcgttagttggggagaaggtgtgggatgtggagcagtcagagggtggatgggaggggtgaggagtggaatatggaatgtaaaaaaataaattaaaaattaaaaattaaacaaagaaatacaaactatagacatatttgaacaaatatgactttactaaaaattagtgaagtaatttttaaaattaatgaacttggggctagagagatggcttagaggttacaagcatgtattgcctttgcaaagaactctagtttgatgccaagcacgcatgctaagtggctcacaaatatctgttaagtaaattttttagagaataaaataaaatggatcaattctactgtgtaaattatatctcaatgaaaccattaaacaaatacaaatgatcctgaagctattctccttgagccagtttctagaattatggaaaaaatcaaggaagttcacaatttgcagtgtccaagtctgctactatctagctttcttgtgataacttaatagtgtcccctgacactcaatcagcataactgaagtaatcttgcagcagcttctgacttgactgaccaagctatacttaaaaaaaatctaccaccttcctacctttgtatcattaaaacctacatagcactattccaactcaagtgtaaaaacagttgaagggccatgtaatgtgccagtcataaggcatgcacatcctaaggctgggctgcagtttctgttcagtgtagtctttggtttttacttcccagttgtcagtatgtaaagctggcagtctggggagctctatgtgataaagctcagattctattgcctctatagaatgtttatttctttccatctcccagacagcctatgcaatctatagtataattttattctgtcacagagctatcttcaaaacaataatgtttaatgtagccactaagtgttcaacatagttgaaatttgtgtatatggcagaaggctggggagaagctatttttcaagcatatacaaataacagaacatctgcagccctttaccgggagaacctgtttgcttttattctgtaggagtttggaattagatccagagagaacagttgaaaaatttacattggaatgaaccaaaatattccataaggtaaagtggagaaggctgagatgaaatggaaattctctttaatgacaaaatgggtgctttctgcagccagcagcaggcattgcaggtgcaggagacccagaggaggatgccaggtcttttctgttgccaatgcaacaaactgatactgctgttttctagtaaaaatgcctcctagtaaataggagacttggttgtaggaaagaatatgctggctttaggaaaatcagtacatactgtaatctgaaaaccaagggacctttataggctgctttctgttttggtagagctatactgtctagtggagcagctactagtcacatgttacactgtaaaatagaattaattaaaatgaaacaaaatgaaaaatttacttcccctgtcacatttgccagatttcaagtgcccagtgcccacatgaacttagtggctaccattacgaatagtgtagactgaaaacttggtcattgtgaacagtgtccacagcaaatttcattatttctgcaagcgtctttcattcttctctacagtgctctctcatcttggacactgaaaaattgctgcctggaattttggctttacccttttacaagcaggggaactgtatttggtgaaaaatattcatttgtggggttgcatttgggctaaacttgttatttagaatgtagctcctaggacttgcccagactgcacactcaggtcccagttctcaaacttggctgattttaaaataccaatggcaagtcaagaaagagaccaccaggatcatggtggttttggggtacaaggcattgggattttctttgtctattttattgactttagaaaagattttacttttactatagactcaactgtatagaaactgttgaaaagctagtagagaattctcataaatcttagcctcagtttacccttattgctaacatctggcattgtagaaccttgtcacagttactaaagtaatcctaataaattgctattactttcatctcagctccaaactttgtctctgtaactccttccatgggtgttttgttcccaattctaagaaggggcgaagtgtccacactttgttcttcattcttcttgagtttcatgcgtttagcaaattgtatcttatatcttgggtattctaaatttctgggctaatatccacttatcagtgagtacatattgtgagagttcttttgtgattgggttacctcactcaggatgatgccctccaggttccaaccatttgcctaggaatttcataaattcattctttttaatagctgagtagtactccattgtgtaaatgtaccatattttctggatccattcctctgttgaggggcatctgggttctttccagcttctggctattataaataaggctgctatgaacatagtggagcatgtgtccttcttatcggttggaacatcttctggatatatgcccaggagagatattgcgggatccttctgtattgctatgtccaattttctgaggaacctccagactgattcccagagtggttgtacaaacttgcaatcccaccaacaatggaggagtgttcctctttctccacatcttcgccagcatctgctgtcacctgaatttttgatcttagccattctgactggtgtgaggcaagacatgaggagccatccagtaagcaacacccctccatggcttttgcattaacttctgcctctaggtttctgccctgaattcttgtcctgacatccttcaatgatgaacagtgatttggaagcataagccaaataaaacctttcctccccaagttattttggccatgatgcttaaacaaagcagtgataaacctaactaagacatatgatatgccaattctcaagatttaatatttaggtatatttgagagcttaaaaacaaatatcaaattcacttgagcttgatttattttcattgcagtcaccaaactgtagcatcctaagagcctcttcatgtactgtgtcgggcttattgagtgtattaaatttttctgcaataaaagtatcttgtaacaggaaaaaaattgttattactaccatatactccagattttcttaatttctacctgttatgattttcctttcccaggatagatacctgtttattcagcatacctcttttgacttcttttggatgaaacagtttctaaatttccttgtctttgatggtcatgagagttttgaggactgatagtactttgtagaataaccttcactgtggcttttctgacacttttctcattattagtttgaagctgtgggttgagatgagtgttgcataggtaaaatgccactttttctcacatcattcaaaggaacacaagtcactatgatccagctctgttcatacaacatggagtcgttgttgttttctctaccctgagtcattgtatgttcttcccttttcatgctgactttttgggagaaagccactgtctctagaagacaaacaagaattattctccatttctttaaggggaaatcacctatacaaattacttgattttcctgtgagagcgacttgtttcctctcccattcatttactaaatcatttgttttataaatacaaactcattggaaattcattttatgcactgagatgtattctcataactgattgcttattttatcactcaaattccatacttctgtattatgaatcatttaaattaacatttatccttttggaatacctcactaacgtaaatgaggattttgaaccctttcttatattaggttgctacaaattatcatatccagaccagttttaccaaggagcctcagttttctcaggtggagaactgtagggcacatgggaatttgtttctgaataggcataagaagtagtgagtttgagtgagcccagatcccaggaatctcagagactggcaggagtacaaccattccctacatgtctctgtatctgttctagaacatttaactatgtcactcaactgaggaccatgggcactgggtcttgtagcataaacatctggagttctccatgctaatgaggtatctatataggccctgagtgttcacccaatgggcttctcttccttgggcattcctttctgcaaaaggtatttaattcctggttcatcctgaataaagtgtatacattcacacccactaaaccacattaaataaaccagtatgaacaagcaaggattttctcttcattaaggatctcagtagggaaggccttcctcttaaagagttgcacctaaaactcccaaggaaggctttctccagcccctccatactctctgtactcactctgaataagattggttatgcctgtccagggctcttctttccccttctgcaaggcaggtggatgatctaagaggaagcatggaccagggagactgggaactacaacatttgttccagatcctgctgtttcccattttggtatggcaaaggaaaacacagtccgtggaccaccattacagacgttgttcttcaacccctaagcagcatgctggtggttggtgttcctggcaacccaggggcaaggcaggacacagtatggtagagaataacagttgactttatgatctagacactgtttgttgctactagagtgtcattgcttctagattagatatcttaactgaaagaaaaaaaaaagagaaacatttgattatataataaccccatatcaaacacattcatacacattttttatgtattgagctgaacatgagtccctattgttgttctcaattctccattaccttacatcttttcttggtcaacttcattgtataccttcacatcagccatgagtaagctggtttatattacatacctccatataactggttacttctacagtatatgcataacagtatttgagttgttaatccatgtccctgtggcaaatacatgcatcaactagagtatattgcttacacacagttcctactatcgttgtcttaccaactaaactctaagtacttcttttaaaacttacttagacaaccactttctcctgacccctgtttagtaaacttgttctatgtatttgaaatgcagtcatttccatatgcatttcatttaaatattttagagcttataaattattccttgaacttccataaaactcatttttgtaaagttctataggttttgaaaaacaactagtattacatatccatcattacagtgttattggagatacttttgctttcctaaaggatcccccatattcaccatctaactctttctcatcctaaatttttggaaaccattaagcttccttctgtatagttttaccttttatagaattttgttgtataagtaccacacgctaaccgattgcgccactggagcatccagaattttgtatagatacattttctcagcagatagatgcttcagatggatttctttctgttagaaaatatatttaaaattcacatacatcttttatgcttgcagagttcatttacatttactactcactagtagtttcttagtgatggatatgccagttttctggtttgggtgactgtacatacagcttctgtaaacattcacacactgtcttttgtttggacatacattttcttttcttctttttttctttgcatcccaactactaccccaccccttgtggtctgcccctcaaaaatttccttccccatctccctccccttctcctgtgagagggtggggctcctcccatatcccctctcccccagggtggtacattaattctttgcagctgccaaggatgaggggtgggggtgggggtgggagacagggggaatcaatctctaggaagtcctggagacctgggataggggaggctcccaggattcaatgtgggttaccttagcagaactgcctaacagtgaatatatattttcaaatcagttgaataaggacctaggaggtcgattaccagatttaatgaaaaagtttgtatagcattgtaagaaactaccaaacttcttgagttctttatatatattggatattagtcctctgtccgatttaggataggtaaagatcctttcccaatctgttggtggcctttttgtcttattgacagtatcttttgccttacagaagctttgcagtttcatgaggtcccatttgtcgattctcgatcttacagcacaagccattgctgttctattcaggaattttccccctgtgcccatatcttgaggctttcccccactttctcctctataagtttcagtgtctctggttttatgtggagctccttaatccacttagatttgaccttagtacaaggaaataggaatggatcaattcgcattcttctacatgataaccgccagttgtgccagcaccatttgttgaaaatgttgtcttttttccactggatggcttttgctcccttgtcaaagatcaagtggccataggtgtgtgggttcatttctgggtcttcaattctattccattggtctacttgtctgtcgctataccagtaccatgcaatttttatcacaattgctctgtagtacagctttaggtcaggcatggtgattccaccagaggttcttttatccttgagaagagtttttgctatcctaggttttttgttattccagatgaatttgcagattgtcctttctaattcgttgaaaaattgagttggaattttgatggggattgcattgaatctgtagattgcctttggcaagatagccacttttactatattgatcctgccaatccatgagcatgggagatctttccgttatatataaagaactcaagaaggtggacttcagaaaatcaaataaccccattaaaaatggggctcacggctaaacaaagaattctcacctgaggaatactgaatggctgagaagcacctgaaaaaatgttcaacatccttaatcatcagagaaatgcaaatccaaacaaccctgagattccacctcacaccagtcagaatggctaagatcaaaaattcaggtgacagcagatgctggcaaggatgtggagaaagaggaacactcctacattgttggtgggattgtaagcttgtacaaccactctggaaatcagtctggcggttcctcagaaaattagacatagtaatactggaggatcccgcaacacctctcctgggcatatatccagaagatgttctaaccagtaagaaggacacatgctccactatgttcataacagccttatttataatagccagaagctgtaaagaacccagatgcccctcaacagaggaatggatccagaaaatatggtacatttacacaatggagtactactcagctattaaaaagaatgaatttatgaaattcctaggcaaatggatggacctggagggcatcatcctgagtgaggtaacccaatcacaaaagaactctcacaatatgtactcactgataagtggatattagcccagaaatctagaatacccaatatataagatacaatttgctaaacacatgcaactcaagaatgaagaccaaagtgtggacactttgccctttcttagaaatgggaacaaaacacccatggaaggagttacacagacaaagtttggatctgagatgtaaagatggaccatctagagactgccatatccggggatccatcccataatcagcctccaaacgctgacaccattgcatacactagcaagattttgctgaaaggacctagatatggctgtttcttgtgagactatgccagggcctggcacacaaagaagtggatgctcacagtcagctattggatggatcacagggcccccaatgaaggagctagagaaagtacccaaggagctaaagggatctgcaatcctataggtggaacaacaatgtgaactaaccaatacccccccccccccggagctcgtgtctctactgcataagaatcagaagatggcctagttggctgtcagtggaaagagaggcccattggtcatgcaaactttatatgcctcagtacaggggaacatcagggtcaagaagtgggagaggtgagtaggggagtgggtggggaagcgtgtgggggaattttgggatagtattggaaatgtaaatgaaataaatacccaattaaaaaaataataataaatggatgttaaccaaaaataaaataaaataaaatgaagtttaaaaaaaagaaactaccaaacttcaaaagaggttgtaacattttgaattattaattaattagttaattaattaatgaacatctcattgcaatttcccctcactgtctcctagtccttccctctactgttcccttctccacaccttcgagtcctccctttcttctcccatgaagaataagctgcacatttgttacatatgtgtaggggactagatccagcccatgcatgctctttggttggtgtcttattctctgtcagcctccatgggcacagcatagttgattttgtaggttttcttctgctgttcttgtcctctctggctccctgagtccatctttcccctcttgcatagaattccccaagctctgactaatgtttggctgtgtgtctcagcatctgtttccattagttgctgggtgacacctgtaagatgatagttatgctaggctcctgtctgcaagtatagcagagtattattaatagtgtcatgagtggggtctctttctcatgccatgggtctcaagttgggccagtcattggttgaccattctctcaatttctgctccatctttatccctacatatcttgtagtcaggaaaaattgcagctgggttgttgtacctattcctccattggaagtcttgcctggttgtaggaagtgggcatttaaggttccatatcacctactgctaggagtcttgggtcacccttataaaatgctgggagtttccactgtactagttttctagattgtcctagagattcctgcttccagttccatccatctctccttccatctaccccaaacttgatccctcctgttcccctcccaaccccctgtcccaccttattacctccctttattcacccaccatgtctattttatttccttttgttagtgatattcaagcatcctcccttcagctttccttaatatatagcttctttgggtctgtggattgtggcatggttacacagtatttcatggctaatatccacctataagtgagtacatagaatgtttgtatttctgggactgggttacctcactaaggatgatatttctttttctttctttctttctttctttctttctttctttctttctttctttctttctttctttctttctttctttctttctttctttcttccttccttccttccttccttccttccttccttccttccttcctttctttctttctttctttctttctttctttctttctcagaaatccacctgcctctgcctcctaagtgctgggattaaaggcatgcaccaccaccacccagcaggatgatactttatagttccatcaatttgcctgcaaatttcataatgttattgtttttaatagctgaatagtattctattgtatatatgaaccatattttctttatccattcttctattgagggacatctgggttgtttccagtttctagctattataaataaagctgctatgaacatagatgaacaagtgtccttttggtatagggggacatattttgggtatatgccctggagtggtatagctgggtcttgaggtagaactattcccagttttcgaagaaactgcaaaattgatttccatagtggttgtacaagtgtgcactcccaccagtaatggagcagtgtttcccttgctccatattctcagcagcaagttctgtcactagagggtttttggttttaataattaaaaaatctatttatttatttttacactccatattttatttccccactccctgtcaaccctcctactattccacatcccatacttcctccccaccccctctatccacatggatgtccccactccccatgccacctgacctctaaactccctggggcatccaggctcttgagggttaagtgcatcatctctgaatgaacacagaaccagaagtcctctactgtatttgtgttgggggcctcatatcaggtggtgtatgctgccttgtttgtggtccagtgtttgggagatttctgggtcccagattaattgagtctgctggtcttcctacaaggtctccatcctcctcagcttcttccagcttttccctaattcaacaacaggggtcaactgcttctgtccattggttgggtgcaaatatttgcatctgactctttcagctgcttgttgggtcttctggagtgcggtcatggtaggtccctttttgtgagctcaccatagcctcactaatagtgtcaggctttgggatctcccactgagttggatcccactgtgggcctgttgctggaccttctttttctcaggttcttctccatttccttccctgtaattctttcagacaggaagaattatgggccagagttgtgatttgtgttttttatgtaagtacactgtcacagacttaatatacaccagaagaggtcatcagatcccattacagatggttgggagacaccatgtggtaattgatcaggacctctggaagagggaagagcagtcagtgttcttaaccactgagccatctctccagctcctgttttttttttttaattttacctattctgatgggtgtaagatggaatctcaggattgttttgatttgcatttcccagagtttttaatttttctttaagctcttctcagccattcagtaatttctctgttgagaattctctgattagctctgtaccccaggcatacagattttttgaagtaataccacatgattctttcaagttcctagatgtcttgttattatgaccccccttttctgattttgttaatttatatattctgtttctgctttttacttagtttggctaagaggttgtttatcttgttgcttttctcaaaggaccaactctgcttcattgtttctttgtattgttctctttgtttctaatttattgatttttagttctgagtttgattatttcttgccatctactgctcttgggtgtgtttgtttctttttgttctatagttttcaggagagctgttaagttgctaggacagtcctttatgaatgcacttgctgctgtgaatttttctcttagtactgctttcattgtgtcccataagtttgggtatattgtacattcctcttcattgaattctagaatgtcttatatttctttcattatttcttccccgatccagtggttattaagtagagagctgtttagtttccatcagtgtgtaggttttctgttgtttctattgttgttgaagcccagctttaatccaagatggtctgataagatccagggagttatttaaattttcttgtatctgttgagaattattttgtgactcagtataatgctcaattttggagaaggttccatgagatgctgagaagaaagcatgttcttttgtgtttgaatgaaatgttctgtagatatctgttaggtccatttgattcataacatctgttagtttcattatttctctgtttagtgtctgtctggatgtcctgtcaattagtaagagtgggatgctgaggtctcccactattaatgtgtggggttgtatatgtgatttatgcttcagtaatgtttcttttatgaatgtagatgcccttgcatgtagggcatagatattcagagttgagagttcaccttggtagatttttttcatttgatgagtatgaagtgtctttccccatctcttttgattacatttgtttgaaactctattttattaaatattggagtggctaccccagcttgcttcttcagtctgtttgcttggaaaacagttttccaattctttatctgaggtcaagtctatctttattgctgaggtgtgtttcttttatgcaatagaatgatagatcctgtgtttttgcatccattctgttagtctgagtctttattggggaactgagttcattgatgttgagagatataataaccagtggttattaattcctgttattttcctgctggtggtgaagtgtgtgggtctctctctctgtgtgtgtgtgcttcctctttttggttttttggtttttgtttttttggtgtggaattatttttttcctatgttttcttgggtatagttaacttcctttggttggagtttttcttctagtatattctgtaggactgggtttgcagatagatattctttaaatttattttgtcatggaatatcttgttttctctatctatggtgattgaaatttttgctggatataattgtctgggctgacatctgtggtctcttacgatctacaagacatctgttcaggacattgggactttaggagtctctgttgagaaggcaggtgtaattctgataggtctgcttttatatgttactttgtctttctcccttgcagcttttaatatattttatttcttttttgcaatttagtgttttgattcatttttttttcatatttgatgctttataattttttctattttttattaggtatttggcttatttacatttccaatgctataccaaaagtcccccatacccaccccccccactaccctacccacccactccccctttttggccctggcgttcccctgtactagggcatataaagtttgcaagtccaatgggcctctctttgcagtgatggccgactaggccatcttttgatacatatgcagctagagacaagagctccggggtactgcttagttcatattgttgttccacctatagggttgcagttccctttagttccttgggtgctttctctagttcctccattgggggccctgtggtctattcaatagctgactgtgagcatccacttctgtgtttgttaggccctggcatagtctcacaagagacagctatatctgggtcctttcagcaaaatcttgctagtgtatgcaatggtgtcagcgtttggaagctgatcatgggatggatctctggatatggcaataactagatggtccatcctttcgtcacacttccaaattttgtctgtgtactccttccatgggtgttttgtttcctattctaagaaggggcaaagtgtccacactttggtcttcgttctcttgagtttaatgtttttagaaaattatatcttatatcttgggtatcctaagtttctggctaatatccacttatcagtgagtacatattgtgagagttcctttgtgattgggttacctcactcaggatgatgccctccaggtccatccatttgcctaggaatttcataaattcattctttttaatagctgagtagtactccattgtgtaaatgtaccacattttctgtatccattcctctgttgaggggcatctgggttctttccagtttcttgctattataaataaggctgctatgaaaatagtggagtatgtgtccttcttattggttggggcatcttctggatatatgcccagaagaggtattgctggatcttccggttgtactatgtccaattttctgaggaactgccagactgatttccagagtggttgtacaagcttgcaatcccaccaacaatggaggagcgttcctctttctccacatcctcgccagcatctgctgtcacctgaatttttgatcttagctattctgactggtgtgaggtggaatctcagggttgtattgatttgcatttccctgatgattaaggatgttgaacattttttcaggtgcttctctgccattcggtattcctcgggtgagaaatatttgttcagttctgagccccattttttaatggggttatttgattttatggagtctaccttcttgagttctttatatatattggatattagtcccctgtccgatttgggataggtaaagatcctttcccaatctgttggtggtctttttgtcttattgacggtgtcttttgccttgcagaagctttgtaattttatgaggtcccatttatcgattctcgatcttacagcacaagccattgctgttctttttttttaattttttttaattaggtattttcctcgtttacattttcaatgctatcccaaaggtcccccatattcaccccaccccaatcccctacccacccactccccctttttggctctggcgttcccctgtactggggcatctaaagttggcaagtccagtgggcctctctttgtagtgatggctgactaggccatcttttgacgcatatgcagctagagacaagagctccgggggtactggttagttcatattgttgttccacctataggggttgcagttccctttagctccttgggtactttctctagctcctgcattgggggccctgtgatccatccaatagctgactgtgatcatccacttctgtgttgctaggtcccggcatagtctcacaagagagagctatatctgggtcctttcagcaaaatcttggtgtcagcgtttggaagctgattatgggatggatccctgcatatggcaatcactagttggtccatctttttgtcacagctccaaattttgtctctgtaactccttccatgggtgttttgttcccatttctaggaaggggtaaagtgtccacactttggtcttccttcttcttgaatttcatgcgtttagcaagttgtatcttatatcttgggtatcctaagtttctgggctaatatccacttatcagtgagtacatattgtgtgagttcctttctgattgggttacctcactcaggatgatgccctccaggtccatccatttgcctaggaatttcataaattcatttttttaatagctgagtagtattccattgtgtaaatataccacattttctgtatccattcctctgttgaggggcatctgggttctttccagcttctggctattataaataaggctgctatgaacatagtggagcatgtgtccttcttaccagttgggacatcttctggatatatgcccaggagaggtattgcgggatcctccggtagtactatgtccaattttctgaggagccgccagactgatttccagagtggttgtacaaacttgcaatcccaccaaccatggaggagtgttcccctttctccacatcctctccagcatctgctgtcacctgaatttttgatcttagccattctgactggagtgaagtagaatctcagggttgttttgatttgcatttccctgatgattaaggatgttgaacattttttcaggttcttctcagccattcggtattcctcaggtgagaattctttgttcagctctgagccccattttttaatggggttatttgattttctggagtccaccttcttgagttctttatatatattggatattagtcccctatccgatttgggataggtaaagatcctttcccaatctgttggtggcctttttgtcttattgacggtgtcttttgctttgcagaagctttgcaattttatgaggtcccatttattgattctcgatcttacagcacaagccattgctgttctattcaggaatttttcccctgtacccatgtcttcgaggcttttccctactttctcctctataagtttcagtgtctctggttttatgtggagttccttaatccacttagatttaaccttagtacaagaagatagaaatggatcaattcgcattcttctacatgataaccgccagttgtgccagcaccatttgttgaaaatgctgtctttcttccactggatggttttagctcccttgtcaaagattaagtgaccataggtgtgtgggttcatctctgggtctccaattctgttccattggtctacttgtctgtcactataccagtaccatgcagttttgatcacaattgctctgtagtaaagctttaggtccggcatggtgattccaccagaggttctttgatccttgagaagagtttttgctatcctaggttttttgttattccagatgaatctgccaattgccctttctaattcgttgaagaattgagttagaattttgatggggattgcattgaatctgtagattgcttttggcaagatagccatttttacaatgttgatcctgccaatccatgagcatgggagatctttccatcttctgagatctttaatttctttctttagagacttgaagttcttatcatacagatctttcacttccttagagtcatgccaaggtattttatattatttgtgactattgagaagggtgttgtttccctaatttctttctcagcctgtttattctttgtttacagaaaagccattgacttgtttgagttaattttatatccagctacttcattgaagctgtttatcaggcttaggagttctctggtggaatttttagggtcacttatatatacactatcatatcatctgcaaaaagtgatattttgacttcttcctttccaatttgtatccccttgatcttcttttgttgtctaattgctctggctaggacttcaagtacaatgttgaataggtagggcgagagtggacagccttgtctagtctctgattttagtgggattgcttccagcttctcaccatttactttgatgttggctattggtttgctgtagattgcttttatcatgttcaggtatgggccttgaattcctgatctttccaagacttttatcatgaatgggtgttgaatcttgtcaaatgctttctcagcatctaaggagatgatcatgtggtttttgtctttgagtttgtttatatacttgattacgttgatggatttctgtatattgaaccatccctgcatccctgggatgaaaccgacttggtcaggatggatgattgttttgatgtgttcttggattcggttagcaagaactttattgagtttttttttttttttcttttttttttttccattttttattaggtatttaactcatttacatttccaatgctataccaaaagtcccccatatccacccacccccactcccctgcccacccactccccctttttggccctggtattcccctgtactggggcatataaagtttgcaagtccaatgggcctctctttccagtgatggccgactaggccatcttttgatatatatgcagctagagtcaagagctccggggtactggttagctcataatgttgttccacctatagggttgcagatccctttagctccttggctactttctctagctcctccattgggagccctatgatccatccattagctgactgtgagcatccacttctgtgtttgctgggccccggcatagtctcacaagagacaactaattctgcgtcctttcaataaaatcttgctagtgtatgcaatggtgtcagcgtttggatgctgattatggggtggatccctggctatggcagtctctccatggtccatcctttcatctcagctccaaactctgtctctgtaactccttccatgggtgttttgttcccaaatctaaggaggggcatagtgtccacacttcagtcttcattctccttgagtttcatgtgtttagcaaattatatcttatatcttgggtatcctaggtttggggctaatatccacttatcagtgaatacatattgtgtgagtttctttgtgaatgtgttacctcactcaggatgatgccctccaggtccatccatttggctaggaatttcataaattcattctttttaatagctgagtagtactccattgtgtagatgtaccacattttctgtatccattcctctgttgaggggcatctaggttctttccagcttctggctattataaataaggctgctatgaacatagtggagcatgtgtccttcttacctgttggggcatcttctggatatatgcccaggagaggtattgctggatcctccggtagtactatgtccagttttctgaggaaccgccagactgatttccagagtggttgtacaagcctgcactcccaccaacaatggaggagtgttcctctttctccacatcctcgccagcatctgctgtcacctgaatttttgatcttagccattctgactggagtgaggtggaatctcagggttgttttgatttgcatttccctgatgattaaggatgttgaacattttttcaagtgcttctctgccattcggtattcctcaggtgagaattctttgttcagttctgagccccattttttaatggggttatttgattttctgaagtccaccttcttgagttctttatatatgttggatattagtcccctatctgatttaggataggtaaagatcctttcccaatctgttggtggtctttttgtcttattgacggtgtcttttgccttgcagaaactttggagtttcattaggtcccatttgtcgattctcgatcttacagcacaagccattgctgttctgttcaggaatttttcccctgtgcccatatcttcaaggcttttccccactttctcctctataagtttcagtgtctctggttttatgtgaagttccttgatccacttagatttgaccttagtacaaggagataagtatggatcgattcgcattcttctacacgataacaaccagttgtgccagcaccaattgttgaaaatgctgtctttcttccactggatggttttagctcccttgtcgaagatcaagtgaccataggtgtgtgggttcatttctggatcttcaattctattccattggtctacttgtctgtctctataccagtaccatgcagtttttatcacaattgctctgtagta

SEQ ID NO: 97 - DNA, 106664 bp, Mus musculus domesticus
agctttgcaattttatgaggtcccatctacacaatggagtactactcagctatttaaatcaatgaatggatggaactagaatatatcatctgagtgaggtaacacagtgacaaaagtgcacacatgatatgcactcactgataagtggatattagctcagaagcttggaatacccaagatataattcacagaccacatgaagctcaagaagaaggaagaccaaagtgtggatacttcggtccttcttagaaaagggaacacaatactcatggaaggagttacagagacaaagtgtgaagcagagactgaaggaatgaccatccagggactgcctcacctggggatccattctatatacagacaccaaacccagacactattgtagattccaacaagtgcttgctgacaggagactgacatagctgtctcctgagaggctctgccagtgtctgacaaatacagaagttgatgctcacagccatcaattggactgagcacagggtccccaatgaaggatctagagaaagtacccaaggagccgaaggggtttacagccccataggaggaacaacaatatgaaccaaccagtacccccagagcttccagagacaaaatcaccaaccaaagagtatacatggggggacccatggctccagctgcatatgtagtagaggatggccttgttggatatcaatgaaaggagaggcccttgatcctgtgaaggttctatgccccagtgtaggggaatgccaggacagggaagcagaagtgggtggtttggggagcagaaagggatgaggggtttgaatgaggaaaccagaaaggggataacatttgaaatgtaaataaagaaaatatctaacagagaaaggaaggaaggaaggaaggaaggaaggaaggaaggaaggaaggaaggaagagctaagaggaacacagtgccagattagatgtttgtctgtatttgttctctctcactacccatcaaccttccccctttcctttgatacaaccaagtcccaggtgaaattaaaatttggacgttgaaactatctagtacaagaaccagtgtttaatttaagctgaaattcaacctgaaaaatatctaaatgtcatgatttgagtaggtgaatgggtacagacatattcccacctactctttctgatacaaatcaactcaaagtctggtaaaatttcatctctatgtcaattttgtccctttatttcaccatcatttgagaatttcattcatgaatactgtatttatgtaatttccacccattccactttctctttcaactcccttcacaccctccctctaaatccatggcctcctgttttttattgtatattttatttatttacatttcagatgttatcccctttccaaatttccccctcagaaaccccctatcccaccccctccttctgcttctataagggtgctcccccacccattcactcttacttccctggcctggcattcccctacactggggcatcgagccttcaggggaccaaggacctcttctcctattgatgtccaacaaggccatcctctgctacacatgtggctggacccatgggtccctctatgtaatctccttggttggtggtttattccctgggagctttggttagttgatattgttgttcttcctatgaggttgcaaacctcttccactccttgggtcctttctctaactcctccattggggaccctgtgatcatttcaatgtttggctgtgagtatccccctctgtatatgtcaagctctggcaaaacctttcaggagacagctatatcagactcctgtcagcaagtacttgttggtatttacaatagtgtctgcatttggagactgtatatgggatggatccccaggtaggggagtctctggatggcctttccttcagtcactcttccacactttgtctatatatttgctaccatgagtattttgttaccccttctaagaagaaccgaggaacctcctttttaaaaattatacacactctggattatataaatacaacctgctgttgaacttgggatctatcccatgggtgggcaccaaaccctaacactattactgatgctgtgttctacttacagacaggagcctagcatggctgtcctctgagaggctctactagcatctgactgagccagatgcagatacatccaaccattagactgaacctgaggacccctatgaaagggtaaggggaaggattgaaggagctgaaggggatggcaatcccataggaagaacaacaatatcaactaatctggaactctaagagctcctggttactaagccaccaagaaaagagcaaacatgggctggcccgtggccactggcacatatgttgcagaggactgccttacctggcctcagtggaagaggatgagcctaatcctggagagacttgatgccccagggtgggtaaatacctgcaggaggcaccctctcagaggcaaaggggagggcggatggggggaagaactctacaagggggactgagaggggagcaacatttgggatgtaaataaataattaattaataaaaataaatacaacctgctgagtccacttggtgctgctccaatgtgtatatgtttaaggatggtcacttgggattggataacttaccagggggcccatccctggataaggttgaatgtctctcagcaacccctgattgcctatagctctttatctaggggtggttccttgtgacattactatccatgttgggatgtcaattagtattgttattgtgcaaatctttagctaatcatattgtaactttatggatgcagctctctgtcatatatagaaaacactatcttgaagtagtctgtgtcatattttaattttttatggtatttaattatttttaaaagatattggaccttttgaaagcaaagtcctatcaataaaaaacaaacaaacaaacaaacaaaactactttagctccacagaattcaattttcattaacccatgtttctctaaaagaagactttgggctgtaggcaaatataggattctcataattactgtttttagagcagagcacaagaatgatagagacttggacacaggcacatttaattgatacaaaggatgagttgagtctcctaagacatctgaagatgaattttgctattgagtttatatgacgcactatggagattaggaggcaactttggatgtcatattgctgaaggagcgctggaattacagatgcatgcttctgagcctaccttttgtgggttccagggattcaagctcaagtcttcatgcttcacaagcaaacactttcgtcactttagtcaccaaacaccctctccagtcctgaagatgcctttaaagtgtggattcgatcatattcgctctgatggcatacatccttttcagaatcactttctcagtttcaatgtcttatgaggtgctcttgtacctcctaagtgaatgagcatttttcttattaaaaagcgatttgtttaatgagcacagctggatggacactgtggaaataaaccatgtatttaaaattatggttgaagaataggaaccattagcagcttcatcctataacctcatctaggtcagaacatagctctacgtagcagcatctaatattgttttgtttcctgatggtccagccaagagcaggcaagctcactggcgctgtatggcctagttaataaggatgagacaagacaagtcttatccacatatggactgggatcctggcacagagcaaaatgggaagggggaatgtggtggcagcaggacatcaagccattaacattggagtttcaaaccctaagtactagccatactgcctggtcggcatggtccatcctgaggaaacttaggacccagaaagtgtatagagtagagttttcacatacttcatgtttggatctgaaatatgtggaaaggattactgggaagagaaagaacatagcagaggatttgatgcttctttcctgaaatgttaactctggtttaaaatgatgctgaactagaactatactcaggtagatgtcaaatcctaatggctagcaaatattttagttagcaaagggaacgaatgattttaggacattcaaaatacgaaaacagactacatgatttgggagggtaacagggtaggaagcacaagccggaattgcagacaggtcgtggtagatgggaatgataaaaatactttgtataaatgaatgaaaaatttcaaagaataaattaactaatataatttgttttggatatgccaaataaaatgtctctagccaattaatcaataggtagaagggtcatagccatcacatggtttcatcacctctgttctctgccaccccctttatatggcaacctcctcattctctattcttctttctaccccgtatgagggcataaatataggaacagcatcacgttttggtagcctcaagaccatcacatctgcaaagactgctttgccaaatgcagtcacattcacatattgcacaaatgatcttggtgcttaatctcagcgatagtaagtgttccagttgtttggagggacaccattcaactcatatcaccttgtcttgtctcacatttgttctgcatttgtcttggtagagaacagctgaactagtacagctgttagtatggtgcatctttgccaagcctttcagagtattcaaaagcccaataaagaggcaacagctctgctagaaaagagaacacaacaaacctcaggtaactgtaaatggatgcagttcagatagtttgcctttcttaccgctgcttgaaatgaccaagtttctacaaatctgctgctgagagatgcctgtgcataaccatctgcccactaataaatggacctgttatttcagttgaaagagattaggccctgtagatgagcgtcatgagtctgtgagtagtcttctcatcttccagctgtgttcacagggtctggtacagggagagaaagaaaggaggagagaagaaagactaacaggaagataggcacttctcccatctaatgctccaattttcaacctttaacatccttttagatttcagaccgctcctgaattacaggggtttcccaagcctcatattgttcatagaagtggaacatttactatcattgggattaatcaccaagatgatttctagaatggttttacagtcttagaagaatttggtcttgcgttcataatgagagtgtcttgctcctatatggtggaacactcatttattatttgggacagattagctccccagtgcccttgcttgctctcatatcttagcctgccatgtgttataacagacccaaagccaatgaatagtcctttcttctgtggggagcaagagtgagatcagaagaatcatgacacatggacacatggccctagctgcacgcttatatccagagtcaacgtttacaggcagcatgtaattgtccatttcttagagtttgactcgtctcttttcaaagaaattgatttttcccatagttcatttattaagtgttatttccaaattgaagttagtaataaatgctcaccagagagggaaataagtcttatctttcacaatctccttcaaattgtattggttaacaaagatgagagaaaatcaagatcctgctaacattttctaagcgaaaaacctataaatgccttttttattttttttaatgtattcttccttcatataatacattctgatcacaggttccactttccccactactctctgatcctcccccacctcctgtctccctcagacccactcttcctccatttcccttcagaaaaggacaagtctccgagggatatcaactgaacagggcataacaagatgcaacaacactagccacattcccttccattaaggatgggccaggcaacccagcaggaggaaaggtatcccaaagcaggaaacaaagtcatattaagcccctgcatccactattgagtcctacaagaggattaaactccacaaacatagcatatgtgcagagggcctagagcagtgccatgcaggctccatgattgtcagttcagtctctgtgagcccctatgagccctgcttaattcagtctgtggcccatgttcttccataacccctctggtccccacaattgctctttctcttctttgtagggttctctgagctgcaagggagggaccagatggggatctccaatttaggctctctctgcctaatatttggcagtgagtctatgcatctgcttccatcagctgctggaagaagcatctctgatgacgactgaggacaagtaggcctggctgtcgagcagatcgctaggtcagaaatgctgtgacctggttttcagaaaagggagtgaagtttataagtgtgtagacagcaggcagttggaggaggagtgaacctgagggagacaggaggtgggggaggaacaggaggagtggagggagggggaagcatctcagatgatgatcagtctgcagttccagcagcctgagtgaaaagtggcccttccccaaatcatctgcttcaacactgcatgctggggctctctttggaggccaccaaatttctggtcttccagaaagtatgctcttatctcttggagtcctattacctgacagcagctcccaaatatgtgaatgtctcaacaccatgaaaccagggcctgccccccccccccccccgtgtgtgtgtgtgtgtgtgtgtgtctggaactctacctctaactctctgagacaatggagttagagattgttgacttattggtctgtggactgccaaatcaggtgtgtattagcctcacaggaggcgaggcatggcaagttacacctgtgatatcaatattccggtgaacgcatgctggaagatctggagttcaaggatagctttagctacaccggaagtttgagaccagtgtaggttgcatgaactcctaactcagaagagtaaaatagtaaatcaatcaatcaaaatagtaaatcaatcaatcaatcaatcaaaatcattagttagagacatgcctaaaatataggaaattgagagaaaggtgtagcctctattgaatccagcctttctctagtctacctaataatttggggcagctggatgctggttatccagctgtcgtttggtataacttctaaggttttagcaatttcagggacagtttcttcaccccagtaaatccagggcacaaataagatgtgatatttacccatctgagactgtcttatttcatttaacatggtgccttctagttacatcaattttgtacaatggcaatgttttcagaacatgtcagatgggtattaggcttttgttttagaagggtggcagaactttagaacggaattagatactactccaaaggaatgactgtgtatttgaacatcactcaaattttattgaaaattaaggctgctagcacagagctgacattcattgtccaactggtggaaggcctgcccaagctccttggcttttcctgcctctaatactctccacattaatcctacatgaagtctaaggtcagaaacaaagcagactaaatagctcttggtgtattttgtgtgcttgtctaccctgcaattttctcttcaagactatgatggtatgtggcactctcatagggacaataccccttttggttcacaactagtattgaaaacaacaggcacctaggaactgagtttatgactgcctgtgaggatcgtgtgtggcggcagtcccaaaggcgccagggactgcagctaagtcttatgacttgcacctgacttcctcatctgaatataagccacaaccatcatgagagctgcgcaggtgtaccaggatactggtgaatccattttgatggagatatgcccctgctgccctgattagctgaagttgtgtgcctggtgaggtggcgtggcctgctgtgcgtggatgggaactgagagtataaaagagtgagaggcccagggttcgagggagatataaacaagggagatataagcaagggagatataaacaagaagaaacaggactgaataaacgtgtgtagaaggatcctgttgcagcgttgttcttcctggccagttgagcgcgcacaagaactgccttcccattgcccaaaataacagaaaggtttctcagtgtatggctgaacatgagcagatctgatgcaaaagaagataagagttagagtacaataggcatattgccctgaaaatgccatcttaggagctactccttgtggaaagaatgtttctagtgctctctggtatggcgtgtgaggaggaattagtagtagtggggagagtgggacagtctcaaaatgttcaccagtcacgagcagtgatggctcaaactaagccacctgaagagcaccctcacagtgagtaagagctgaggccagacactcagtaccagggtttcactggcgtgcgtggaagaaccttctcaaactgcttggtttccacaggcagattggaatccagcacaactgtgcttgaaatgcacagtagttcacaccacgagcagcctcctaagtgcagccactgagctgagaagatggactagggggtagagtgcttgtcttgcagcatggtgatctgcgtttcatcctcagaactcacatgacaatgcaacatgtaatcctaggctttaggatgtaaaggtagaaggatctctgggggggtcactgtccagcctctccaaccttttggtaagccccaggtttcagctagagactgtctcagaaaacaaagtggactgtgtctgaggaggaatgacacagaaaaccttctgggacacacatgccctcgcacccacccacccacctttaaaggtgcagctgttaatgctgaagactattttactttgtgggtaggtgtcctatgtcagtgtcacctttggctagacctggtctctctccatgtttccccttttgcaaatggaattatatacttcaggaatgttgaaagggcaaaagcacaatggccagactaatcagttagtttttcttaattggaagtgagagcaaaaaacaatgacttgagtgctacttttctccttagccatgtctttttttctcagaagcatccattttattgctgaataaacactcaggtcatgttgatgttccacaaacaacaggaagacaactcagagaggagaaactaattaggtaatttttttccctaatttttctgtggatgacaccagacttatatatttatattccctttccttcagtgtgaagaatgaataatggattgtgatttcctaactaaagctgagacctaaggaggtcagtactgtcacggcctgtaagtagggaaagagtccagaccctactcgtacctcaaagaagtgaccttctgctaggaattaatcatttgaagatcatatttcttatgtgcttatcccacaggaggaagtgattagaggctaaaattaattgcaacctaggattaaccatttgattttatacagtggttgaattttatttttagatcgcagtagccttgatacctttataccaagatgtttctttactatgctgttaaatctaggaaaatcctgcagaaaaaggacacatttaaaaacaaatccccaaaccaaccaaccaaataaacaaccaaccaacccacccgaattccaaaaggcagtaaggcaacccctgatctgggtcagcagggcatgccaagaaggtgatgcttccttcttagtcagaagtgggttgcattgaatgtaggttcaagggcacagtgggggtcactgtcagtgcctgggaggaaagatgtagtgagcgaggcactcatttcccaccaacttagtcaccccaaagccaacatacttttttggaggtgtagttgctaatagaggagtgtctggacaagaaccgggagggagtcttccaccatgtgcattggaaaatcatttggaaggctgaagggtgtttggtttgctcctttcccagggtcagcacaattgggccatggcaagacctgagaaagcacaactgagcatatgggggggggggatatgaagttcctgtaggaaagcccagtttgatctgtttactggagaagcttctagtttaggcatctgattcagtaagaaaatacagacacggctgttgcagcataaggggagcattggtaaagtgtcaggaggcatgcagaggaggggcgctgccttccacctgagccagctttgtagagaaggagcttgggtaattgctctcttctctgactgcccacagctcattgtttactcctatggtagagtccttgtcaggctgggctgccattgtctatttatatgtctgtctctccaatcagccctccagcccccagagggcaaggggcaggctttgttccatccccttccagggaccagacacaatctctgcacagagaagtgcctggggaaactctcctaaagccagccaggcaacaggcagggcaaagctgcttctgaaagggctcggaggtatcagtgtgctgccggtgtcaccttttcagtgctgtgagctccttagctccttcagctccttcagtgccatcctgtttctgtgctttgctcagagctcaccaacacagagcactacgctgttgagatgcttccttttccccaacaactaataaaaatacagagaagctgagctcccaaatgcctacttcttcatagccaatgcaaaagagaaaaaaaaaatacaatgatgcagagatcatgctatcagtcttgaaccttatcctcttcaaaattcgacatgcagacctcttgtaccatctactatgatgcagtaggagatgcaccacttgcaaatgaccaaaccattcaccctagccttcaaaccacagaaatgatggtgatcaaaaattaagttaaacaacctcccttttatttaataaaatgttttgcatgcttccaacatataggcatcagatgtaaattagacagagttaatttaatttaaagttaattaatttaaagttaatttgttttcaatctgtaggatacatgaacagaaacagtgaccatatgatgtcttaatgctgtgattgtggaaaatagaagtagttcatagaggaggattaagtgatagggactagggattgcctaatgttggaatctttttccattatgttttcggagatcccttcttcaactcatcatacccagggcatggtggctagtatctgggagagctccacagtgaataaggtagagttctactcccttggggggctcatactgtatcatggaatacaaataattgacatcccctggctgaatgtgaaaagggttatctgtgaagagccatgtgctatggagacccagagagcatatgagatgtgtactgcaagatatatgacataagaagtccataaattgaaaggtttttctttttttatatatatattggaatacatctgtctataatttagcgaacacttaaagaagtggcagggtctattagattggaaaccttagtgaaacactgtgattctgcttcccccagcatctactcatacaagtttatacttagaagtcagctgagggcaactgaaagagacagtttcccacagtggcttctgtgtgcatgtgctggggcaccaagagataacaggcgagtgtgtgcagccttgttctcgagagaaagcacagaatggaacttctcactgttacttatctgtcaagtgattttcttagttttgcttcacagtcttattcttgaaacaactccctgtggcagatgcttgctcaagtcagatgcaagaataatacatttaacttttagcagagagttggcacagtgagaagccgtgatgtttagccctcaagatatggatttgaatacctcacagaactggattaaaatctcagttccatctctttctagttgtgtggcttgggtaagtgacttgacctctctgtctgtcaggtggaattatcagcatttcctataggcatgagttggaaacttatctgagataatatatgcaaaacagtctgctctaaatacataatacacgcaaactagtgtcattcttaggatcattcaatgtgtgggatggagctgcctgtgttttcttgttaggttctcacattgttcagggatacccagcacacattttctgcactgcgaacaaaatacttgatgcatgctctacatcttgggataacattctcctaaagcaatctctctcatctgctgctgtgttcctaactgccatttgttgctagtgattctctaaactttattttcagtgtagacacctcttgtgagaacctagattccctatcctttcatctgaattcacaagttcctcacacatatcaacctcatatgtccaaaacacaattctcctgaggaagttttcagttgcagggaaacctcatgttttctatggcaactaagaggtgcttcagggaggaattggcatagatcaagccttcaaaataaggaagagcattagtaaatgtaaacttagtcagaggactgggaaatcatttcagtgatttacctcatagtctgggtaaagagaagtgaatagattcaagagagttttagggtgtccaatagagtggcatgtttaattatatgccttcaaatctccctttttactatttcatattactccttagtaaatattcatgttttgtgcattaaaactttttagccagatatcactgattccagtatttgggatgcagaagtagccagatctcccttgagttcaaggccagtttggtctacctagtgatttctaggacagccagagctaaaaagtgagtccctgtctcaaaaagcagcaacagcaaaacaaaaacaaatcaaaatttaaaaagaccttatagtctgggtatggacacaacacacttgaaagttttctactaagaacccctgggctaggtgtagtagcatatatctgtaatatcagccctgggaaggctgggttggcaagattgtgacctcaaggccagcctggcctatcgagaagttctctgtctcaaaaaacaaagcagaacaaaaataaaaataaaagagcttctcagtgtggctgcgtcccatcagggagcaaagaatgcatgcatgcatgcggaagacacaagtgtgagtaggaagacacaagtgtgagtaggaagacacaagtgtgagtactcagttctgcgtcagtaaaaacactggcaaacaagggccaggtagccagagaagcagccactgtcaattacaacatgctaaattagcatcaaaactgccttatcttttcagcaataaatatggcattgattattgaaaccaataattttagcaagatatacgtaagctggttgcattttgttagcattttggaaattttatttgtgtgtgtgtgtgttgttgttgttgttattttctttgcttgaaacaaatctttgctatgtagacctggtttgtctggaactcccagcatagatcggattagtcatgaacttgttggaatcctcctgtctttgttttctgggtgcttggactctagatatgtaccacatcactgactcaacataccttttaaatgcttggattcacccatatcacttattttgcaaataattgacttggaaagaaagtttgtggctttttagcaaaggaagccagttctttctactcttagaaaaagacacgtgactgtgatctcctccctgtagccctcattgtcaatgacctgcagaaactgaagttcgcctgcttaactccgtcatgacctccctgccattgagtaatttattcctaggctggataaccatatggcagggaccaaaagtggggatttgatcatcaggatatgtgtgaattttgctatttacgaatatgttagtttccaacaatcaattgtgcactagcgaaaatcaacattatgttcttggatagcaaaggagccatgcctcctctaaacaaggaccacctgtgtggtgattatttgtgagtttttcctctggccaggaacaaattgaaacagggattctgggagcaattagacaaatgggggaattcttgtgtggcttagggctgaaatcctttgagatctcacttcttggaccctttcttcctaatattgtatgtttgtttgtgcccttttttatttggttgaaagttggagtaagtgggagccggtcaagcaattcattcccccaggggcaggaaattagaagattgggtgtcttagttaagcaacccttcaggctccatcctcatctcctttcagccactcatcaatctccggaggtcttctgcccaggactttgtcccgaggaattcttagctctcctgtatcgaaaacaggagagttagtccacaagctttccacttgggaactggtttttatccttttgtgcttctacatctggatatgttttgtggagtttcaagttcctgactcctgtatgactgtgcttggttatggtagaaatcttaaaacagacccatgtttcatggcccagttggatgctagagtacagtaaattgatgttcttgtctcttcatttccttccatagccttctttccttcctttctcttcccctttcctctctatggttgtttagaaatagggtcttgccatgtagccaaagttggctagaactgtatacaccaggctgatctgaacctttcagcaattctcttgcctcagcttcctaagtgccaagagcacagacctgatctatcatctttgaattttctgaccatatttcaataatcatctctttatcttaactccatacatgcaggcaatactcctcttacaccctatgtatgccttaggaggcatttagtgaggggacagtgaatcattgcttgccctattttaatcctaatcttttatctatgtcccacaatctcttacccatttttctgtattttcatttttttgcccacattctagcatggggttttaaaaaaaatttgtttcctagtttgatgacaatgatttgtttaattttctactaaactaatatattaaagtggtcattttcaattattatgaccttcgatactagaatttttttctttaattcttctagattttcagttttctgttaataatctctatttaaccttgtgatttctcatatctagtacactgagttttattttttcattttaaacgtataaagatactttattgttttctttttctaattagttttaaaattagcatgtaaagaaatgatggtttaatgatggtgctttcatactgactttgttcttgtggatcccatccccacctccttctcccacccctcctttgacgctctggctgatcaacttcctttccacagtagcctcccttttgctttcacacaacacatattttattccagccatgcacgttttgaagttcatgttggatatgtctgtatgaatcaagttcaagttccattgtttctttttctcttggcttttagtcaagtgatgtggcttcctggtgtgcttgatgcttttgatgtgactacagaaaaagaagatctttggggttggatgatgtgactgtcttgaagaaagattgctttcacatctacacaggtgtccgtcaattcagagttgttcttcagtcttttcctgtagagctcactttctagttcactccactccgagttgcagaacttagaggttctaaaatgtatttattttttcagtggacagggatagaaaacattatacccataggagaccaaataacaaataatccatagtgattaatcccagtacttaggacacagaggcaaacagatctctgtgagttccaggccagagtggtctatgtcaagttcgagggctacatagtgaaaacttgtttaaaaaaaatcaatcaaacaaataaacaaccaaatcatcaacaacataacaacaaagaattcacatcaatgaatcatcttcaatcaataagaaagaatatattttacttaaatttttgttataacattattttctttcacactgaaagtaattttcttgataacaatgatactatcatttttgcaccataatatgcatgtaacaaattcataactcctaacaaaagataatatgcaatctaagattacttttctgtttctctgtattcaatgtgtatatttctccagggatatacagtccaaacactgtgagacagcttcaaagcattctgttctatatgattatgccttcagcttgatggacagataagtttatttagctgaatttgctttcaatttaaagggattgatgttttctctttgatttaattttgttttaaaattctatgaaatattaaatggctctcaattcaaaagtacacaacaaaatatttagagatttgattcctatattggcctcttctttccatcccttattttctggctttagcttattggcaatcacatttagttactgttctatggcttttttcatgattatatttcaagaacaagcctgctttctttgcataaaatcaccttttctatattcttttttgtacctttctttagattgtggcataacaatatcaagtttccctgtcctcttgggtcacagccttctctatgtgatgtatgtgatctatgtgatcagccaaactgctactgagagatatcagatattagtgaagaccctgtgcacatatgattgtatactttagggtagtgtgggaaatactgttggctcaaaaggcaaataaatatgaaaatttactggatactaccaaattcttctctatagaacaggtgtgtgtgtgtgtgtgtgtgtactaagtaggagatatttttactagtgtatatgtctttatggaaatttttgcttaagggagatgtccaagccacttgccctggtcacccctgattcctctttatagcctctgtctccacagtctattttcttcccttgagtctcatgcagttttgttgcacccccatcacttttagtcacctgttttttacccattctctatctcctttttagaattctaggctaatcccagtcatatatgtttatatgcatacatatagaagttaggatccacatattagtaaaagcatgtggttttgtctttctgtgtttggtctggtcttatttctctcctttgcatgctccctgcagccagggggaattctcaaagtgctctgtgtacagcagtttccaatctttcctttggatagtccctcctaggatctgcaggaagctgtgctctcttgagatttgagcagcacatccagcagccttcagctttcagcctagggcctatacactccccactccttctagcatgtaccctatattgccagttacatggaagtcagttactgatttcctcctgggagggtccctaatgttctcatggaaatgctctttcctgagtgtcatctggatgaatttgtagcaaaataatggtgttacattctcacatttgccagaggttttaaaacttgctagttcatttcacaagcatttctcatgctgtgtaccaagtatcctcagacatggagactatagccatggtttctgcctcgtgttctccccctacgggaatccctgtaccattctgccccacctatgctagggttacttaagaaaagcctagactctgtcttgatggccttgcacctgcagcctcagagtgtggttcagggccaagaactctggcgaaatagggcatgtagccctggggagcagttgcctcttccagcatcccatcactctagttccctataactgcttaaagaccagacttggacctcccagagatccccaacctccttcccaggtctctaccttctgcgcagcgctgaactactctgcagtgccacccagaggttgccagtcacacgacagagatttatattttattttattttatttcatttttgtctctgaacatgggcttaaggatttatcagtgatatctggatgtctggcattgaattcctgccccagccacaaacacacttaggatccctgtgactcagaaagctacctccaaacctctagtctttttttttttcccattgcatacactagcaagattttgctgaaaggacccagatataactgtctcttgtgagactatgccagggcctagcaaacacagaagtggatgctcacagtcaactattggatggatcacaggtcccccaatggaggagctagagaaagtacccaaggagctaaagggatctgcaaccctataggtagaacaacaatatgaactaaccagtaacccggagctcttgtctctagctgcatatgtatcaaaagatgacctagtcggccatcactggaaagagaggcccattggtcaggcaaactttatatgccccagtacaggggaacgccagggccaaaaagggggagtgggtgggtaggggagtggggggtgggtatgggggacttttgttatagcattggaaatgtaaatgagctacatacccaataaaaaatgaaaaaaaaaactctagtcttaaccaagcggtagaatgaggagagtaagctttggcaaaacagagttgtccattagatgacataatacttccaagtgaatccaggtggggggaaccatcagtgtgagtgttatggcacacacaaatgatattcacacgaaccgaagaatgcagagtcccactagatgacagtgtggctaaataactctttaagttcctaggaggggtagtattctaaatgtttcaccacagggaaaaaaaatctgctctcaaaacttgtgcattaaaaagtcatagctacagttaaaagccaaagtagcatagcaagtaacctggaaaatcagcacacgctggagagacggggattaatgtctttaatacacaaggcacatttgtgaatcaatcggaaaagacaaacacctcagtgggagaattggaaaatacacgaataagcaattcatcaaaagacagattaccgagaatcaccacaaaatgttcagcctcaagaacagtcaaagttacgataattaaaaatcacatagagttttctcacctaccaaaagaacaaaaatttcagagtagaactaagtcatcaagagttctagggcgcattgaacaggccctctctgatgcagctggaggaggagcaacagctactccattgtggatggaaggtgactaatgtcaccgaggaaaacaagccttaagccccgaacagcaatgtctcttttatgaattcagcctaaggacataatgtatgaaaaatgtaactgctttacaaatcataatagccttgtgttataatacatgcatgaaaagaaaaaaaactaaataagtctataaccattttaaaattatgggaggcataagacttgggaagatgtttgtgccatattattaggtaggaaaagcacaagaaaagaaaattatatgtacaatagaattcatttttgtggataaaattatgtagctattacacagaccagaaacaaattaggcttcacaacaaaacatcaacagtggttgtctcagaggagcctgcattatctgtggcggtgtgacatttctttctttcttagtttatattttcttttcatttcaacatagaattatctgtcctggctcttctttggcctctattcatttacttcctcggagttttcaaattacaagtgtaatataggcttattacaaaatatccaaaccagacaggagtgtgtatccaaaggctttctctctcatcactctcttccccagagagctcagctgcaagctgcttgcatagatatttccagacttgtgtgcatatataaacacatttatagatacgttcatataaacagtatcacactatatacattgttccatggcttgcttttctcactaaacaatatgtcagggatgtttttcatgtcagttcatatagacctgcctatttttaaaggtatgcttttcagcagcttctgtaaacagtgccgctgaggtttgcatagggactgaattgagttgctaggttgtactgagtagtatggctattttaaccatatttgcaactgcttggaagtgtatgaggatattctacaaagagatacttgcacccctctctttgacttatcagactattggacaatagttcaccaaggaattagaatttactccatgaatctcagtctgggagaagaaaaaggccaggagcctgatgacagccagaggaggaacttgtcccccagacagacatttcacacagttctgacaacttgtttgactacttttcaggagagactggagctcagacaatgatgggttgatgacctgagggaccacactttgaccatgatacataatacttaatcatgcatacctctttttctgtttaaacttcaaccttgagtctggaccctaagacaaattgttgttgttgtacctctttgttcctgctcccgacatcgtcacactgaataagtaaagtaaatcccttttccactttttccaggtctctttttaattgggctattggaggccactgactgaagctggcttgttaggaccctcagggcccaggctcatgacactaattctagtaacatactaattcatgcaatctacagacagcatttttttaaaattttttattagatattttcttcatttacatttaaaatgctattccttttcctagtttcctttccgaaagtcccctattccctccccttgccctgctccccaacccacccactcccacttcctggccctggcgttctcctgtactggggcatataaagtttgcaagacctaggggcctctcttcccaatgatggccgactaggccatcttctgctacatatgcaactagagacacaagctctggggcgtactggttagttcatattgttgttccacctataacaaaaatgttgtgacccctttagctccttgggtactttctctagctcctccattggggacccagtgttccatcttatagatgactgtgagcatccacttctgtatttgccaggcactggcatagcctcacaaaagatagctctatcagggtcctttcagcaaaatcttgctggcatatgcaatagtgtacagacaagatttttaaggattctggagaccttttgaagtgggctgtattttatattatataaaaagcaggcataagacttaggagacaaggttatatattttttctaacttttaaaatttactgtttatttatctgtgcctgtgtaaggttatggtgcttaaagtgatgtatttgtgtgtcaggttgataaggggtgaattaaggtggtttttttttcttaatatcaacttgtcatgagctaggatcacttgagctgggtgcctcaactgaagagctgtcatggttaccttattaatataggaagctccatcccaatgtgagcaatgcgttcgaacagtagcccagattttcaacaggcacagcagaaggaaggttatccctttttgctcgcttgtctttcccctttgctaccaagttgatttactctgtggcagttgctgatcctgttgctgatagcagaaccagtgtctccaggcttactccagtatgaagggccagaggctttccagacattccaggctgttggtgtgagatgtgagactgctgaggaatccagcctcactgagtaactatgtcatcaggggcttctccagtctaacaaatctactgtggaactactgggactactgagggaactatcgggttctcagcctttccggagtgataacactgttttaatataagctgatttaataacttcattgaatatatacattcgccatattgattggtctgtgttctagaaaccctgacatttttccacttacttgagtattcttttctgcctttcattgatgccctctggattttactgtccttcctttgttgaatgtacttacatgtactttccaacattctgaactatcttttttgtttgtttgttttgttttttatcgagatacagtttctttatgtaaccctggctatccttatttatttattttttttaagaccaagctgaccgggaactcagggatctgtctttttctgctgggaataaagatatgcactgtcatgcaaggctcgactttctgaactctcccccagctgcttgacatagctttagggcaattccctctttccctactcatccatcctgtttgctaatgctaactgcctgaagcttgcctaagatggtccagttagccttccttctttttttcagaccaggtaaggagactcaggggagagaagcgtaaaggagccagtgacccagaccccagtgaagtcagtgaacctgagccttaacttgccttttcctctcctccctttccctctcttctcttctcctctcctctcttttccttctttgcttaccaagacaaaaatcttattttccatcataaatccatacacataagctttgcaaagttcagataataagcataaaagcaaaagtgagaagcaaagcctgagcatatttaagtcaggggacattttctgtggggacattgctttttgttcaggtttctcaaacagacagaagtacaccaccttgtgtacagttaggtatcttaaagccagtgtttggtctgacattttccaactgtatccctcagattgtaccttggagatgtcacacattgttccttaaagagttgtggcttactggccttctaagtgtaacattgacacatgggccactttacaattgtcattcaaatactgaagccctgcataggctttgaacatagttctgcactgaatctttttagccaggaaagggcagatcttgcattgtgcatatcaggattactggtattgaataggcagctctgggatgtaaggtttctggaacagtccttgcttatgggaatcattccaagtgtttgcaaaaaaaaccaaaccaaaacaaaacagtgtggagcttgctatatgaacaggtactcagggtgcccaacttggagaccccaagttccataaaagcagcagcgttttatgagttttctttctgtcaagttggaatctcacactattgttagtcttaagaccttaggaaattgctgaggccatttcaggtgactgcaaaagtctggtgatagtttaaggacaggctgttttcctatcatggccacactcagaaaatgaatagccttgagctggagagatggcttagtgggtaaaggtgctttctcccaagcctgactacctgtgtttgagcccttttactctttagtgggaggggaagataaaagttgtctttttccacaggtatgtgacacaccacacacttaaacacacacattcatgcatgcatgcatgcatgcatgcacacaagcacacatgtgcactgtacattcaatttaaaaaaagaatatggacaatctagaagcagtttatatcccttccaggtgccccataggtcttggttcacttctctcccttagctcctgaggatggctttcctttccgttttatgattctcaaacccctcttcttacatagggaccaggccagacatgaggcctaaggtaaatcacagattcccctaagaaaagaatatatattgtctgtcctaggattttactgcagaaaacactcctctaagaaacctacctgtctttagagaatttttgtagagaatcaactgtgtcatgcaagggaccaaatgagtcagtcaaaccagagaaaaggttcgtggtgagaaagagttgggctggtgttctctagctgcatatgtagcagaagatggcctagttggccatcattggaaagaggcccattggtcttgcaaactttatatgcctcagtacaggggaacgccagggccaagaagtgggagtgggtgggtgggtggggggagtgtatgggggacttttgggatagcactggaaatgtaaacgaagaaaatacctaataaataaaaagagttgggctggtggcttgctggcctgctatgcctattgctgtgggtgttcaatgccttggggtagcacttcatgcaaggcactgccatatatcttccctctgttcctcatcaaggccacctaggaacagtgtggcatggaaagagcataagacacatcacttggagggcttctatcatggctgacttcagggatgtgaaggttagggtgcaaataaaagatgaacaagacacatctctggtcctaaaaatgagactgaaagagagatggagggacagcacccatacctgcttgctggaaagaattgtgaatccttgtgactgggtgttacaggcttgggagccacataactaactactgggggagaggagaaagatgatatggaaaagaataccctttgagtacaaaattgcaggagttttatgcaaacatattcagtgggcctttcagagactaatcacccgcgcttcacacaattaggtctctgccattatctcatttgagcctcacagcgactgcgggggccctaggagggagggcagccagcccattatcctcatgtctgagatggagagatgagaaaattgcagctgttactgccaaggagacaaaagcctgccgctgtcggcaggacctagaactcagggatggggcctgcagaccacctcacctgctaaattagcctctctagccacaagactccacagctgaactctcacgggcttccaataaaaaaattaccacaggtgggagacaggaaaaggatagtgcaccctagagccgacagaccccttctacaggctggctctgtcctagcattctatgctgaatagccccagggatgggcacggtctctattctgctcatttcataaagaattcagaagcacagagaagttaggtatcttctcaaggtcacacagcaaattgatgggatttcaatctagctgttttattctagaaattccactaaaaatgtcgattctgttgcctgctgactatacttgttttatactgaatttcactcaataccttatatcctaagaaacatttgtttccattttcttgtatccagggaactagtttcttacaaaacaaaaacaaaaacaaaaacagtgtgtgtgtgtgtgtgtgtgtgtgtatatatatatatatatatacacatatatatatttgtaaacatactgaaacttttaaaaaaatcatccaatttggatcttgatttttaaaatcttgatgctggtggtttcctaatatcatttaataagtttttaaagcaagaattaaaagtcacacacggtggcttgtgtgtgtacccccagcatttgggacactgaagcaggatgatcactagcaagtttgagatagcctaggcctgagatgcataaggagactctgcacatataaatcacctcaaaattcccctattatgaatactctggagggtagtgatagacaggtttgctcaggactttccatggtatcaggactgccacataggttcttaacagaggtgttagccaggtgtcatattggttcagaaagactgccgagtgctggactttagcctggacaagaaacaacctctcaccaagtacaggtgccctttggaaatttccctgaagtctcatcccagggaatggcctccttggggctacaccaggaggcactgtttccctcattttgcagctaaggcaagtagcgtgctaacccgccgacttccttagaataaagggtcagaagcagaatatccttatgagcatgcacattcacatccttctcttctgaagcagatgtgtttcctcctctcagaacactatgaagaaatgagactaaaatatttgaatgtttgcgtttgctagtaacattgaccttttttgtttatgattcattttttatttattattcattttgcttgcttttattttgagacagtatcttacttagtccagaattacctcaaattaggtttgttgttgaacatgaccttgaagttctcatcctcctgctcccaccctcatgggctgagattactggtgtgcaccaccatgcctggctgctgtattgcttcttctggtgagattatcccaatcttttcccctgttgctcttgttactgttttataaccaaattatctggtgctttatgatttttatattgtgattgtacacactactgattgacaagtgataacatcagcaggctttctatattggtgtatttttgttattaaaagtaaacaaagtattaaataaataaaaacaaaaacactgtgcatagggaatgaaagtcttaacaacatgatcttccaaacttcatatatttctaataaaaaaaaccccaccatatttggaatggtacttaacaattcggttggagccatatctctaatacaaatcaggatgtctagatgagaagcaggtccaacgctgcctgagctcatgggactcagtgaaggctatacacaattaataggagctaaatacctagggatgcaatttgtaacaacaatttgaaaaataaatttcttgttaatctgattggctggaagtggtggtatagacctttaatcctagcacatgagaggcagaggcaggctaaatagcaagtactaggcaggcagaatatcatagttaaatattatttctaaaaaccaaaatccaaaacaaaatgaagtatgcatgaaaacactcgagaaatctgaatgagtgctaagataatctcattgtaacaatgtcaatgctctagtttacatcattgttttatggagtagaaaaatcattcagagaagcttgatcgagttcagagaggacatctggaagaggccactgagcagatccaactcttctagttcatgtccccagccctgctcattctccaaccatggcagacgaactccacgtggctgagatggagaaatttgataagttgaaattgaatatggcagaaacacaaaagagaaaaaatcctctgccatccaaagaaatgattaaacaggagaaggaagctagaaattgcaacgagaagccaacatgcatggtacattccataaccatggccttttggtctctttcttctagctggttaactctgtagaatgcataaaggtggataaaattaaattaaatttaaatttaaatgactgtcatttaaatgacagtgaagctttccctttcacatcaaagactcagaacttttggcaatgaaagtctcatttgtctctcctatcaagtctggaagaaaaagaacttgcaggttggtgaggggaaaggagtgagtggtagtgaaatatacagtaaaagtcatgatggtcctgcaggctgtaaaatgcagtttaatcagagcaagccacacccacattctagactgggaatgaatgcttcccctcccttcccccagtcaatagggctattcaccttcattcttgggatcttagtgcattcagggatagaaaagatgcaatacctttaggctggaatgcaaaaatcaaagtgccctgtgtttacagacagcatgattattaatgtaaaacttccaaggaatttttataaactaaatggtataagacagatataaaatatacagaggcaattatgcttccatggattaagaaaaacaaaattgcaaaagtgaaattttgaagaagtgtccatatttcaaagcaaccagaactggatgactcaggcaatcacattttcatacttcctataatgctacagtaagacagatgaggaggtgacatgactaatatatacatgagttgaacaaaatgaagaccagaaataaaccaacacattaagctgggttttgacaggatacaaaggtaattgaacagagaaaataaggtttttgagcagatggggaccttaacgtataccaagcttgttcagataggacaaagtagaaaattttataacacttaaaaattggacctctagagactgtcatatccagggatccatcccataatcagcctccacacactgacaccattgcatacactagcaagattttgctgaaaggaccctgatatagctgtctcttgtgagactatgccggggcctagcaaacacagaagtggatgctcacagtcagctattggatggatcacagggcccccaatggaggagccagagaaagtacccaaggagctaaagggatctgcaaccctataggtggaacaacaatatgaactaaccagtaccctggagctcttgtctctagcagcatatgtatcaaaagatggcctagtgggccatcactggaaagagaggcccattggtcatgcaaactttatatgccccagtacaggggaatgccagggccaaaaagtgggagtgggtgggtaggggagtgtgggggagggtatgggggacttttgggatagctttggaaatgtaaatgaggaaaatacctaataaaaatattaaaaaagaaaaatattggacctcatcaaaatagtagaatggttggatctggagggcatcatcctgagtgaggtaatacaatcacaaaagaactcaaataatatgtactcactgatacgtggatattagcccagaaacttagtatagtgagatataaggtacaatttgcaaaacacatgaaactgaagaagaacaaagaccaaagtgtggacactttgccccttcttagaattggaaacaatcacccatggaaggagttacagagacaaagtttggagctgagacaaaaggacagaccatcaagagactgccatatccagggacccatcccataattagcctccaaacgatgacaccattgcatacactagcaagcatttgttgcaaggaccgtgatatagctgtctcttgtgagactaggcaggggtctaacaaacacagaagtggatgctcacagtcaactattggatggatcacagggcccccaatggaggagctagagaaagtaaccaattagctaaagagatctgcaaccctgtaggtgcaacattatgaactaaccagtaccccagagctcttgactctagctgcatatgtatcaaaagatggcctagtcggccatcactggaaagagaggcccattggacaggcaaactttatatgctccagtacaggggaacgccagggccaaaaaatgggaatgggtgggtaggggagtggcgggggtgtgtgtgtgtgagacttttgggatagcattggaaatgtaattgaggaaaataccaaattagaaaaagaaagaaagaaagaaagaaacacagttaaggccagccatggtggagcatgttataattctagggcttaggaggcagaagaaggggattaaataaaatttcaggctagcctgtgctacctatcaagttccattctacacaggactacagagtgagaccctttattaaacatcaccatcaatagcaacagcaatgtaaagaaatagtgttcagagccaagtatggtggctcatgtctatagtatcagcagttgggaaactaattcagaaagagagtgaatctgaagccattgtgagatatataacaagattgtatctcaaaaacgaaacgaaacaaaacaaaacagacacagttaagaaaatgaaactcaagaagaatgaagaccaaagtgtggacactgtgccccttcttagaattgggaacaaaacacccatggaaggagttacagatacaaagtttagagctgtgacgaaaggatggaccatctagagactgccatatccagggatccaccccataatcagcttccaaacgctgacaccattgcatacactagcaagattttgctgaaaggacccagatacagctgtctcttgtgagactatgccggggcctagcaaacacagaagtggatgctcacagtcagctattggatggatcacagggctcccaatggaggagctagagaaagtacccaaggagctaaagggatctgcaaccctataggtggaacaacattctgaactaaccagtaccccggagctcttgactctagctgcatatgtatcaaaagatggcctagtcggccatctctggaaagagaggcccattggacagacaaactttatatgccccagtacaggggaaggccagggccaaaaaatgggaatgggtgggtaggggagtggcgggggtgtgggagacttttgggatagcattggaaatgtaattgaggaaaatacgtaataaaaaaattaaaaatcctctttttttctcgctccccggccatcttggcggctggtgttggttgggggttgtcccgcacctaaggcaggaagatggtggcctcaaagaagatgaaaaagtctctggagtcgatcaactctaggctccaacttgttatgaaaagtgggaagtacgtgctgggctacaaacagactctgaagatgatcagacaaggcaaagcgaagttggttatccttgccaacaactgtccagctttgaggaaatctgaaatagagtactatgccatgttggctaaaactggggtccatcactacagtggcaataatattgaactgggcacagcgtgtggaaaatactacagagtatgcacactggctatcattgacccaggtgattctgatattattagaagcatgccagaacagactggtgagaagtaaacaataaagttttcctttaataaaactttgccagagctccttttggggaaaaaaaattaaaaataaaaaaaaagaaaatgaaatggtaagtctcagataggaagtacgtatctgctaagaaactaaaccagatctatgaatttctcttgaagccatcagggtaggtagaatattactcctgagtctaactcctgagctcttcaggccctaagccctgaacaatgtgcatgtggccttatatgtgaaggccttgaactgaagacattattccagatcatctagatctttaatgaagtcacatggatttgaatgagagaggtagagaggtttgcctgcagacgggagaatgcactatgaccacaaagcagcagtagtcaaaagccctagacaccagcagccatcacatattgaaagagacagggactacattctctcttggaacaccagatgggagcaagtcatgaccacatgattgattccaggattgacccaccagagaactgcagtgcaacttctacctctgagaactaagaaggaatatattactaaactgctgtgctgtaagccactgcatctgtatgactacattgccataactctaagaaactaacctggccagtgagcagaagtttaattagaaaatagagaaaatatgtgaattgactctcatcaaagagaagagatgaatgcaaataacttcaggaaaagaggatcaaaaattttaattataaatcccactaaaacctgtgttgagatccccacatacatccattagatagctaaaatataaacaaataattatgtagagcaattagaatcatagtgttttgctgaccaaaatacaaacatggtattcatgttaaattctcataatttcttgtagaattaaacatgcgtttagcattttacctagcaatcttggaccccccagatacttatacaaggaaaataaaggtaattttctcaaaaatgtaatatggaaatattatagtagttcatccctctctcactacactcgggatggcctaaatgttcccctgctgaagaagtcattctcacgatgatggtacatggctatttacattttgcaaaatgcatagaattgtgcacctaaaagggtgaatttttctttaaataaattatatctcaagacataaacaaaagtttgatataaatgttaagttagtagcaataacaatacagattaatatttgatgctgaaagttgtattatgactagtgttggtagtactagacatatgaactctatgaaggaataacatgctttttcccaagcactgagcacaaagcataccacttagtagatgttcaataaatgattattgaataaatacttgaatttgcattccctaataattcttttagaatttctcatgttctaaagacagtccctgatcataggtaactgcaatctaagagtagggactccatcccagaatgaaaaaaacctcacaatgggtttgaaaaaaagctgaacatgggttttggggttgcaaatgactttacaataagtggatctgagagttttctctcaaaagacttcctgttccaccagactctcttcaaccttggattctttgacagatttcacaaagattgaagacaggccagctccaagctgcaaattgaaactcatgcagtcaacatgggtggggtgggggaatctgttaagcctgctttccctttaacagtcatacttaaagcaccttcatattccaactctccttacctgctttgtatttcccacatcatattcacctcttatgaagattttctttgttggtaataatattgtccacctcctccttgtataatttaaacccattatggacgaagattttttattagttgatgaatccacacaaaaatctaccttgatgcacattgtcatggttattcttcatggtcaccttgactggatttagagtcatctgggaatacaattctggatctgtgcaagagagtgttgctaggatcttttaactggggaagggagacaactggatgtggtgacatcatcttatgagctggaatgcaggactaaatataaagagaaaagggagaaaggagtgtgagtgtccttaatcatctttctcttctgactgatccatgtagatgtgagcaagtcttacacgcgttcgcgaccggccaggaaagacgcaacaaaccggaatcttctgcggcaaagctttattgcttacatctttaggagccagagcgcaagagagcaagagcaagagagcaagagagagcatggcgaaaccccgtccctttttaaggagaattatcctccgcctaggacgtgttactccctgattggctgcagcccatcggccgagttgtcgtcatggggaaggcagagcacatggagtggagaactacccttggcacatgtgcagattatttgtttaccacttagaacacaggatgtcagcgccatcttgcaacggcgaatgtgagggcggcttcccacaagcaagtagccccctattgccattcccgacttgataaaccctcaaactgcgagccagaaggaatcctttcttcttgaattggcttccagttaggtattttgcaaccaggccactagagtttacaatcaaaaagcaaaacaaaaagcattctacacacaacaggctttcaataaatgagtgcaaggctaaatcaaggagcagagccatgaagtgcacacattctgcttatgtgaggaatatggtgtgctggtccagcagcacccatctgctaggaggccctgtgtgtttttaagtgtttacattctctctatttttcccttgtcattcctaccttcttttccttcattgctttctatgggtgctgtaaaggaggaagtactatacaagaaaagaaagccatagaactatttagtctctctttcctcggggctttgatagggccacaggggctccctgcattgctataataatatcagaggctagagaagccaaatatatgcacgggacagtctgaacttaactatctgatcactggaaaggaggaccagacaaggagagataccttcaaagaaatcagactgagggactccaatcagacggagaaatggctccgatctaagagcagatactactctggcagaggacctgagttcaattcccagaacctgtgttaagtggctctcaacttcctgtaactatagctcaaggagatacaacacccatgtctgcctttcttggtcactgcatgcatgtttagagacctacaaaaacctatacccaaaaaacgtaattataaataaatctttaaaataaaagcagactaagatgagtaatgaagcagaaaatgggacgtgagagctgttgatttgggatctggctattataaatatttcatagaagaaaatggctgcacattcctgctacatggaactgtgtgcctctctgccctcctctccacaatggactgtatttctttagactaggagccaaataaaccctttaccccccccccccttaagctccttccttgtgagatactgggttgttgcgcgcgctcaacaggccaggaagaacgacgctgctacaggatctttctgcacacgtttattcagtcctgtttcttcttgtttatatctcccttgtttatatctcccctgtttatatctcccccttgtttatatctcccttgtttttatatctcccttgtttttatatctcccctgtttatatctcccctgtttatatctcccttgtttttatatctcccccactaatagtaatcctctctcgaataataatcctccctctaacccgggcctctcactcttatatactctcagttcccatccacgcacagcaggccacgccacctcaccaggcacgcagcttcagctaatcagggcagcaggggcaaatctccaccaaattggattcacctgtatcctggtacacctgcgcagcactcaagatgtttgtgtcttatatgaggaagtcaggtgcaagtcatatgacttagctgcagtccctggcgcctttaggactgccgccacacccgctccccacactgggttacagtgaaagaaaaggaactcctatacttgtcagttataaaagctctatttgggggtctgctccaagttgaagacctctggaggctgtttcacagttcctggcatcatcttcctcaagctttcacttcccacacaaaagagtcctagcctagtgggcctttcactgctgcttctgcttgtgtcatatttcaggaagccacaagggagtcttgtccacctgatgctcttttcatctctttgaccccccatttcttgccttcctctgttcacaataactgttttcaactcatgtgtgtatatgtgcatgtatgtatgtatgtatgtatgtatgtatgtaaaaatattcaacctttcaggattctaacatggcccctactgacttcctggatggtgactactttgctatcatattctgtcatggcctttcttggcagtcaagcaggcagcagaagcctctaatacaatgattcttaatctgtggggagtggcctctttaggaggttcaaaggaccctttcataggggttccataagaccatcggaaaacatagatatttacattatgattcataatagtagcaaaattacatttatggagtaacaataaaaataattttatggttgggggtcaccacaacataatgaattgtattgacggactgcagaaccactgctctagtaggttcctggcatgtgccaggtcccagtccagggaagatagcatcctcctcatgcctactcccattgaggatgccttggctttatctggaaaaagaaaagcttgaattgggtgatgtagaaacgcccttccaggtacagaattctagaggagtatttgaatgtcctctttttaaagctttaaggactgtaggaaatgattaccataaaacatttccaggttggtggactgacatctgtcaggacactatgttttaacaactgctgtgcaaacttaagtgatgtttacacacaaaaatgttttactgtgggataccatcattgtcctgctgtcagtggccaaggatgacactccattacaagtcttccttgtcctgtgaaggaagattcatttactaatgaatcttctaaagcagttgagtcagtctgtgtacacagatggtgaaagggacagacaataacctgtctgtaggtgtatacaaataggcctatattactacatgctcagagaggacaaacatatctggtatttggagaaagggacagccatgtagcagaatttaccctctactttcagctgagggcaaggggcccactactctatccattgactaccagggaaccagatttccttctgccacatctgcaaacgtctaatagttataaaccaggccttaagaagcaaggcttacacacctgaggatccatcccataatcagactccaaacgctgatgccattgcatacgccagcaagattttgctgaaaggaccctgatatagctctctcttgtgaggctattccagtgcctggcaaatacagaagtggatgctcacagtcagctattggatggaacacagggcccccaatggaggagctagagaaagtacccaaggagctgaaggggtctgcaaccctataggtggaacaacaatatgaactaaccagtaccccctggagctcgtgtctctagctacatatgtagcagaagatggcctagttggccatcagtggaaagagaggcccattggtcttgcaaactttatatgccccagtacaggggaatgccagggccaagatgtgggagtgggtgggtaggggagttgggggggagggtatgggggattttgggatagcatttgaaatttaaatgatgaaaatacttaattaaaaaattagaaatgaaaaaaaaagaagcaaggcttagagcactgccatacttccttgactccaagcatgcctgttcctcacttctaaggaaaagaagatgaagacacaccataggtgcattgaataaagtcacatttcttttcttcttcttcttcttcttcttcttcttcttcttcttcttcctcttcctcttcctcctcttcctcctcttcctcctcttcctcctcttcctcctcttcctcctcttcctcctcttcctcctctccctcctctccctcctctccctcctctccctcctctccctcctcttcctcctcctcctcctcctcctcctcctcctcctcctcctccttcttcttcttcttcttcttcttcttcttcttcttcttcttcttcttcttctttctggtgtggctctttctcccatagagcccagctaactgccaatcagtactttgcactatagaaagtgatggctgcagtcgtcactcccccctcccccaatctttacaggaagtgattatcagatgaagtaagcagttgttcagaaagaggcagacagtaacctgtctgtgatattatggatagaaaattattgatgaactgattcatctccagaactttgcctacaggttgagttctctgcactggaactcacttgcatcctcatttggatttgtgtgtctgtcttgtgaacatgtatgagagatgtcagagtgaacagtaggcagacacagatttctttccataatatcccctggaagcaggtcaaagaagacatggaagtgttcacacagacacttgagagtgagacactggacaagattagtgaagtccacatcccaaatgtggtaggggaatagttgaccagcaaagggctttttcatgtgcatgtaccattgtgggacagatctctctctctctctctctctctctctctctctcacacacacacacacacacacacactttggcttttagcacacccgaaaggcatatccatatcaatcgacttaattttcccactgaaaaacattttccttctcaattcatccagatttttgttgttgttgatttgagattagacatcatgtaccaaaggcaggattcaaacatgatatgtagaacaagctggtctggaactgctcctgatccaacttcctgtgcatcctgattacaggatcctgtaatcctatgctgggattacactttcgaggcaccatgcctggctctcctcttcctcctcctcttcctcctcttcctcctcctcctcttcctccttctcctcctcttactttttctaattttgagattataattataacatttctcccttccctttcctccttccaaactctgccttattctcttccttgctctttgaaattcatgaactctttttcattacttgctgttacatgcacatatatgtgaatatattcctaaatataatctgctctgtctgtatgttaattgtacatttatgtttgtagggctgaccatttggtattgtgtaacctattggtatgctcttccctggggaagaatatttcagcattccttagttccctgtagttctttgtgtagggttgaggcatctggggcttccccacccacatccgcattttgttgtcctgttcagctcctatttgagcagttgtgccgatgagacatgggtgaagcttttcaaaatccgaagaaacacaatcttacagcaaactacctgcctctctggtttctacaatctttctactcccttctttttgttatcttcaaatcctgtgtatcctagcctggcctctaactcaccatcctcctgtcaggccattaggatttaatgcttactcagtacgttttagttgtttgtttctcttttccacgttcctcatgtggtttttctagattgggagattttatgtttaatctcatttccccaaacagcatgtatgaatacacaagcacacagacacacaaggagacacagtaccccatgccctcactcctggagaagcacactcccatatttgcattcacacacatttgtgcactccccttaaccttttccctcttggaagtggatctcttcttcccagtactggagccagaggggcagctggaagagcaaggatacacagtaccccatgccctcactcttggagaagcacactcccatattagcattcacacacatttgtgcactccccttatcctttcaccccttggaagtggatctcttcttcccaggactggagccagaggggcagctggaagagaaaggccataagcaggcagctggtgtgcttagtctgttatgctcccctcccctctctgacctggtgatggaatccagggctttgctctcacactaagcacgtcctctaccacgccctctaccacagagcagccctccagccctgtcttttactatcagtgatcaaaacactgactcacccttgtcatgcttctaagtttctttttcccgtggcatccacagtttttctttttctggagtctggggtggtggaaaaggaaaagaaaaacaccctaagatttctcacatccattcaatgtacttaatttattcagtcaatgttgggaatgtagcctcctcctggagtgagtgggggttgggaaccaagatcacactctgaggtgcactggcctcagggctcgaagacttcctgagaagagtttctgggaaggcttttgccagaagcatgctctgctgaggcccaatcagagctgccctgcccttccctcctaggtgtttcagaagacctccaggaaatcggaatctagactctagttcagtgcctgaactagaggagctctgtcatcagaacccactgcctctggtctccaggagccctggatcagctctcccaaggaacaaccttctgccttttgttctgcccacaggccatcatcatctcctcagcactcagccttcgcctgccagagcatgggtatatatctgttgggttgtggctttgtcgtaatgcttctcttccagtttccgcagtcacacttctagtactgtgggaggtgcttctgaaagcacttgggccaggatctttgaactttcaactggcagctagagtcttgccaccccatgtggacagactttttcttaggatgctgttatagaacttgggggtcctccctgctaccaatctttaataagccaattaataatggaaagcagaaaagggagagttattcaatgtggtcccattgagagaagatggacaaagtgatggagtgaaaccctcaagtttgttttgtggtttcgggagtgagattaaaattcaaatagaaggacagtgtatgcatatttaagtgtggccgtgccctcttgttccccattgaaacatcttggtctaggcttcttagtctcagtgtgtaaggtaatctgacaagttgttagataaattctccccctggttgtggccttttctttctctcagcatgagtttcctgggggaaattctagagtttatttaaggccttacttccccttgcctccagagtctcaatcttgtgtatactctggattttccataaaactaccttgtccagctctgagttacacacagttaagctgggatcttaggtctaagaaggtagttcttttttcctatcatatcctttcctccttttaattttggtctagaagttgaactatgctttttcttcaaagggtgtattttatgagtgtgtattttcagaaaacaaggttcccactgtccattagaagtgttagaaacaaacaaacaaaacaccaataagctcagcattgcacaatggaacacacaaacaaagggaaagtggctcagcaagacaacctcctttgcaaaaggatgcacctagacccaaccctgagtagcaagcatactggggcccaagatgcctcctgtcttttcttgctgactaggtggtgattgaggtttaccccattgctagcagttcaacttctcagtctgagacaattggctaattggcacaaatgggaaggagaagtttcaggaagtatgagtccttgttggactaactacatttgataagacaaacactaacaaatggacccccactcctcacacgaagacgccagggcagcgtctttatttcccactgattctgttgttgaccatatggttgaatttttgttgtcctcacatctcagtttttgaaatgccatattgtgtagacatagactcaaaaaatactaattgatctttcaggtattgctgtctcatccaaagccacagggggaactccaaatggagctgtgtgagcgtaaggctttgtggaacagtcctacaaattagggggcagctcaaaacttgagtgtatttgcatactttctttgctacttggttaataccagtggcatttacaataatattgtgcagaaggtactagaccaagagttaggaactataaattctctaattacatcaacccaagaaatttggggtaagtcatttccctaaatagttctcagttttctcaaaaatagtgaatacttggcaaatgtttgagaatcatttcctgattctaggggaaataatgatgtcactactatcctttccttccttgtgaccatgccacacctcagcatatgaccttatttggaaatattgttggtccaaaatataattacttatgatactgtcatatatagggtagtcctctaatgcaatcgaattggtgtccttatgaatacagggcgtttgaacacagacaggcagagatcaggatgtcacttgtacaacccaaaatgctaagggagaagcacagaacgactccatctttttctagtagagctcagaactaacctggagaacacctccatcttagacatctaggagtgggaaatgattaacatgttgtttaaacaacagtccaggttgtggtcctttgttatcgtgatcttggcaaagattaatacatctacattgtttttgcggccacaactcagttgtttaacatatattgtctaaaattgggtacatacaatcattcttttcacattcatattttaaagatttattctatcaagtatactacagcatattttaggttttagtaatggtctttccatttaccctgtagatgaacaggattactttgtcagtgtgacaaaatttatgcctcaagtcaaataatgtgatgttttagttgttgaagttcattagatttttagaactaacaaaacttgttctcagaatacccattattaagtttatgggttctccgggggtttaaggaccatggggtgctaagcaagttcaggaatcaggaaagtgttccggcaaagagccctacctcatcatgtctggtggtatagatctggaatcccagccacctgggaggctgagacagaagaattgagtccaaaacctgctaggctgtggactgagttcaaggctggcttgagtgagtgagaccctatgtcaaattttaaaaggggatggggagttctgggagtagttgttcagtagcagagcacacatccagcatgctacagagatcctggtttccatctccatcacccctccatgccctctccctccctcctccccctccccctctcttgctttcactccaaatcaacatagacaataatttaggatttatggaacatgctacttatgttgcatctacccaatattaaagttgtagagacaatgcaaatgaatatgcatgactcagttccaaacgttctaattatgaatattaaaattcaaatggcttttctgagtcgtttctgagatctttgacattttcttacccctcagaagagagaaaacttggctacaggccccatctatttgactggctgcccagtgtgtcacgtggaacacccagttttccacgacctgagttcatacattaggttcacctaaggatctgcatgaggcctagagaggggttactccatttcaactgaaacgcaagcttcctactgctccatcaaggctggcttacttgtcctttcagatgtgcttagtatcccgtggtgcagaaaataggtatgtggtcagcagccctttccgggcttgaccatttaagggctgtcacagtattagcagccaaaggcaacctaattttgttaagcctgtcctagagcttacacacccttttctgttggtgcctctcgggttgcctgggagcttaggcccatctgtccttactattttgagtccctgttgtctcattggcggctttctgaacagctgcaaaacatacttttaacactaagtggaagtttgggtcaccggctcccactgtggaacagtcactctcagcaagggctttcagcgagagttctctagttttactgactccggtgagtgttaaactaacttctctcaactccttgctagattgccaaggcgggtaggaatgaatgaggtctttgcttatgggctggtggaataatgtgcactgctttttgtgttatcggaaactgctcggttgcctagcaccgcagccgacagctgggtcgtcctttccgcggctcctctacctcgggtcaccaggctcccgtgacaccgcaagcgggaccgagaggcgaacgacaggcactgggcccggaaggacaatgctgcgcggaaagtcccggctcaacgtggagtggctaggctactcgcccggcctgctcctagagaatgatccgctggcagcgggacggacaccacgaaccccccgcgggtaagtcacgtgagtgcttgcagcgtacccgcgcccgcgcgcgctgcccgcgcgtcactacgccgcgccacgcgagcgtgcttcggcaggggcacttccggcgcgaccggcctagactgtcaccctgttagccgccgctgagcctccgctaactacccggcgcctgctgctgccctcccggccacgccatggagcgtcttgataaagcagcgctcaatgcgctgcagcctccagagttcaggtatccctgagttccgctgggcaacggtggccgctcggctctggcctggcgctggccccagggcaggcaggaggcagggtgggcttggggacgacccctccacgggtcaccgcaggctgatgaagaggtaaagtagtttggagcctgcagcttctgagtggcgggccctcagttcacgcttccttgctcttcccctccctgtttggctgctttgcagtcttcccctttgccaggtggctcttttgaggataggcgcccggtctcctttatcttggcgcttgcgagcccctacatcacatggttttttgtaaatatctagtgtgtgaatacagtggaggcaggctctgatgtgaggtcacttctcttgaggggaatcaattagtaggataaggactggtgactgaacagaaagaatgtgatagtaggcctctctgaggcaagggcctggggaagaagttagcagccattaattgacatcatcagatttttcttaattcttagtttggctgactacttaaattttaacttgagaagaaaaaggaagttgaattcacataagtgaattttgtgatccaagatcacaaaattagaccgctgacaggtctcagcagcccctagtcaggtataaaataagtcaaccaaatgacattcattgctttgttttatgtcactgatactacctgacctgatttgtaccagcagaaccaacaggtaaagtgagctatgactagaaactaagaagaaaatggtctaactgctaggggaaggtgggtaactgcttttcttgtaagttttttgcacacttaactttgactatcactcataggctttggatattttaggtggatattttgatcagtaacagactgcaaatgtcttccatgggattgtattatctagtgatatatcagccattttagtttgtatggatatgctccgggatgtttgtggagtggcagaaccttctgaaaatgcatttctcaaaatatttcactatttttaaatgggggataactacttaaactactgaagttataaaagagaaaagtcatttttttaaaaagtttaagttagagaagagtaagaatgtattgaaaataatagaccataaattaataacatatgaacatacagggtgtggggacctggatgttaatatatagaaaagattatatttacacgatggaactatggttttgttcacactaatatttttattatgttgtatcattttaataagtgtttataaaattatttttaagctttattgttttaaattgtgtgtgtgtgcatgtgcgtgcatgtgtgtatgtgtgtgtgtgtgtgtgtgtgtgtgtgtgtgtgattcaggttcattaaggaggtcagaggcattgttggatcctctgaatccgaagttaaagcagttgtgagctgcctgacatcagtgctgggaatggaacttgggttctctggaagaaaagtatgactgagccatctctctggcccatccttgtaaaaattataccagatagtagatacttaagagagataatttaaaaaacacactagttgtagtggcatagacctcttaaaactacctattgggaaatccgaggcagaaggatcatcatttcaaggcctgcttaggctacagaatgagttctaggctaacatgggcaacttaatgaaattcagtctctaaaggtaaataagaagagcttgagaagtagccacatggtagagcatttgcctaacatatatgtagctcagtaatggtagaatatagtagaaggtaatacatttaggtaccaagagataatcttagaatgttttcttctaccagtgtactgcccatgacaatcaatataagagtaagattttatttctcccacttatacaaggactgattaacccagaaaacttgctaatacaatgtagttttatgagatataattttcatgtatattagctgtttaaacttaatagccttgtgtctgctttattgtaatttgacatacagttccatattttctgcccctatccatagttgccagtgtttattttttctatagatttggtcatttttaatatatatatacatacatacacacatacatacatatataattgtggaatatgactaccttgattgtttgcgcatatatacacccaccctaacacacatttcactgtctctctctttcacacacacatacaaattaagaagtggctgcgtctgtctagaatacttagccatgactggagtgtctagacggacttttgtttgttgatggaactttttactgtcagatttttcctcttccctgtctatcagaatagtttaaaatacatttctattttctaggattttggttgatttttccatcacacttttaaaaagtaatcacattaaaggaaacacaattgtttaaatgatgaagtattccaaaaagaatgccttgttttttgtgaaaatgcatttctctgcaatttcagactagcttcaaattatgcaaactaagcagtaatgctaactatgggttttacatctagtctttaaaaaacactgtgttctatacccttcctatcatcatactttggctcaaaccagaggactataccagaaataaaccagaaaagacagatgtattctagaatcaaactgattctattttcagttgtttaaatgatgaaatattcaaaaagaatgccttgtttattgtgaaaatgcatttctctgctttatttggagtctcctggaatagccattaattgtcttcttggtttactctcaccctgctgtatgttctatgaagccctaactaggtgttgaatcagtttgattctagaatacatctgtcttttctgctttatttctggtatagtcctctggtttgaacagaagtgtgtatagtccttggggaggagctgtttgattgcaaatgggtttgggtttttttgatataatgtttagaggcttgtgtgcctgcatatcaatctcaggatctgacttgggtgcacacatgcgcatgcttgtctctttgccgcgttctggattgcagaagctatttgctcagaattcttttatcttcaggatttttgtatttggatatggtttgtgaaaattgtgttcactttcttccagaaatgaaaactctttagctgcaaccctgaagacactgctgttcttcacagctttaatgatcacggttcctatcggcttgtattttacaacgaaagcttatatatttgaaggtaatctttacgtactttaagatatttttattttctaatttattctgagcttttatgagtccttttattgtaaaacttgttttcttcttccttttgtgtaagttaaatatgtggccaatgacagtttgtatgctttggttggctgggtgtggtgctgtatgcctgtaatacttgggaggactgggctacatgagaccctgtcttaagaacaaaacaaaattttggaggatatttattacttacactgtattgctttaaatgttttgcacaaattcacctaaagaatccccacaacaatactctgaattaattagaagcatggtacaaaaagtgaataattgcaatctgcactaccagtggaaatgggcgaagaaaagagaagagttggtaattagtaattccgacttttgtgtcatgagcactgtccttccatatggcctgctttgctctctgccttagggtacaggagttttgttttgttcctgtatactttggaactgggctccacgacttggttgtagttttctgtaatggtgttcatcacaaacagaattcttaggttttgaattttgtagtttggtaagtaataagtgtgtaataaaatgaaatattctcttttcttgataggtgcccttggaatgtctaatagagacagctatttttatgccgcaattgttgctgttgttgctgttcatgtggttctggccctgtttgtctatgtggcctggaatgaaggctcacgacagtggcgtgaaggcaaacaggattaaagtgacatcaccttttgatagcatgaaatttatttttgaatatgttacataattccggggtattgataataaatacatttgtttgaataaagttgaaagaacatgttaaaatcagtcttaaagagtcagtcacatttggctaaattttgacccacccaataatatggttactttgaactttgaatctccatttgcaaatgaaaatgtggaaaagttggagaggtacagatgtatatgtttcatgagttatctcttatcctagggagaatttacatatcttacaataacaaaaatgatagcaatgtggcttatacttgcttttcagttttatttatttgggtatattaagaaatacttcatgaagcaaatctaaattcccttttttactgaaggacttcgctggaattaccaggctcttgggtttgagattctactttccttaaaagttacttacattgtaggcattttagttaatctgacttttaagtcagtgaggaaagattgctctcacattccattatttcacagggaaagtcactgaaaccacactattcatgcaaaagggtgtagggttactgaggacagccaactgggctgactgccagcattgtgaatatcacactatcattgtgccctcactttgctttgaaattaggtttcagttgcaaagtttatcgaaattccacttaatttgttgttctaggttaaaatagttttagaataccaaaatgttcagcatttacaaattgagagtctatacaggcttgaaacatcacaattcttatgaggtgttcatgaagttgttttgtctattaatcctttttttaaatgacatctcagctacatcctgagcataagctatgttctaagataatccttagagtctttttttgattagaacaaccctgcgcctgaaaaaaagcccagttcccttggtaccttcagtctctggtcagacagaccttttggtactgtgtatgtgtataaaaacgacgacccccaaatatttatttctgattaaaagataatatattctggaaaacactggaaaatacatataaaaattaaaaaagcaaaaaatttcccataatgttaactacctgcagattatcagtagtttagttcacaacccctgtacaagtacactaaaaccttgttttaaatttagatcttgtcaacttcaccaaagagctgtttgcagtttttcagatgtgtggtaattgcccattgccttacaaagtatatactatctttattattttaaaattcccatttcaatgttttcaccataaagaaatgtaaaaatttgaggtgataacctagtttaaatactatataacatgcatatctcaaaacattacatggcacccataagcgtgtatgcttcttgtttttatgttaattaaattgaattgtaaaaatgaagaaatttcaaatacctgttactgataatcctaatataataaatggcccctgcttaaatatttgctattattgatttgatggtctactgttattttcatgctgtggaactagactagaaaaataggtgattggatataaaaatatgtgcttgtgttatgttattgttataaacaacaagattattgtgattttaaaaagattgttcttaattcttaaatttaacagttgtgtgtagtttaaatatattttaaaatgagcattctaaccatgagagtctttattttgtaaagactgcagtttttagtattatgatatttgagtcctagacattgtgtgctagagttctagagggttggttcccttattaggtggcctattatatttagaattgtccactcagtttctttttatgtaatgccaaggcttttttcttatactttaggaatattgtactatttgtaaaatatactgttattttgttttatttcaaacgtttgctaactaatggtacaggtcttttaaaaagtattttacccagggatacatgtaaacacatgtaattttcccttggcaataaagtacaatgtgtttgaccattaaaatattcacactggtatttagaattattataaaacttgttttaaagcattttttctaggattttgactgcttacttatgagtttgctgctgttaggtaacatttttttaaggtttttaactagtttcctctttcacaaagtacatatttcatgctgtgttagaagaaaagctacagttaacctgttaagtgttttccggcggaaactgttcactgatggtcaaaacctgattgtaatggtgatcccagttagggagtataacttgaagtgtccttgcaagctactaatttaaccccacttgctgtaacagtacttttcccaacttctgatatgccttccgaataatcctttcagtgctaaaaaaatggaaggctgctgtaggatgcatctggtatcactgactctttaaatggatgccatttcacaggttagagtagcattctggttttcaatgatagtaaagaattttaaacctgctattcaaagtaactgcgtatttcatgggaatctaatagtaactataacttgaagtttacatgagaaaagtcatagtgaaccggttatggtgttccattattttaggaagcagatgtaggaggattaggagtttaagaccaccctggacttcatgagaccctatatcaaaagaacagcagcaacaacaaaagctacaaaaacaatttgacttaataataataaaaaaaagcaactaatgggcttgtgcttattttcatataaatcttttgtagacaggacattcaaatgggtaagtgaaagtatacaaggaagatgtaaccaaggaaggctgatgctggaggtgtgcgaaagaaaggcttgagatccgttttacatatatccagtgtatctccagacagtttgtatttagtgtgtaagtatagtaaatctgtagacaaagtgttcagcgatggtacagtatttgtcacttgtcttcagttaatagcaggtttctttactacgttattcactagtgaaacacacagctattcagattttgctcctaaaatttatttttaacagacttgtgctatagtgtagcttgacaacattttttatcccaggagaatggagttaccttaaaataaattactttcagagatactggaaatttactcatcaatgcataacctgtgaatttcttaactccattcctttacagacgtctagaatctttccatatcgctgccggccacacttttaaacctgtgttaattgctatgtgtgcttgaagtatctgttcttttaaagatgttctttaagtcatattgtcagttttacaatctagtcttccttccatgtttggtgaaatctcactgaacaggaataatagcaataactaacaacatctgcacagcaccttacagtttgcagagaacgttcacatattcttgtctgagttttgcatagtgaacatgtcacagagatgtcccttgatgtcaatgctaagtgttagaatgttcagtcacagtgtcactggccttgctgcggcactgattagcacactgacgggtggggggaggggggcgtgccgatgtgctgtctgtaaagctgcgtcatcacaacggggcctggatagcttagccacttgcttcagactgacttgttaagtgatgcttttctactctacctgaatggcttttgtagtcagtatattgtagcctgtaatttatattaatttaccatttgttgtcattaaaaaaagtgtctgtaatgctactgtgctgtgtcctcattcggtgaatattgttacattaacctctggtttttaaaaaaatctttgtgagcttgtttctgcttatactgtagaatatgtccagatgtcagtttttaaatgtgtgtttgcttctctgtgtgtcatatagcataagtgtagagctgtcaaggaggtttagtatatcccatgtaggtagagtggagatatttggggtgtgttggggtactgatgtagaaggactggttatattccaagtaggtggaccagttagaactgatatggggttagggtaaggaaagcttgcctcagtcaagtggaattttacacacctataacctcagcaggtgaaggaagagcagatgttcaacttcatcctgagctgcataagaagtatgaggcctattcgtgctacatttctgtttgaaaacacaagttatcttgtaggttttggggagtaaatagatttaaaataccactaaaggaataaggttgaaaatacatgagacttattaaaggtgagaagagaattactggagaccttcagcatgttcggcattacacacatgcacacacgcgcgcgcgcgcacacacacacacacacgtgcctttgactagttttctgcatcttgtttattgcactggctgcagctccttttggtgctcccgaggactccagctaattcttagtaataaataccaccccattccagctaccatttgaaatgtctcagtttcaaaagtatagataatgagctgtccagggagctcaggagaccgacaggtaatagcactgtagaaaccaaagcgtgctgcttctatggtgactggaactcgactgtggaatggaattaaaaataaccaattgtgcaaatgtaacatagacctttaactccagacctccgagggtgcagcctggaaattatggacaagttagttggcctaaatgtgcttgtgaaggaacttgctaaaagatatgcattttaaaatgtgggacttgatgtttaaaacatgactataaaatgttcattcagggttctgtgggcccagcaacaagctgtgttggacacattttcatatcaatgtactttggagcatggaacaaatgttaatgtggggacagaacaaggccaaatggtgggaccatcccttagtgaactcagatctgtgtgagaactctgccttaagaagtagaaagatagtaatacaatctccctgtaccaaattccatcagttttgactcaggaagagaactaaatggttagagcagggttgtgaagttctttcttctatttgtacctatgagattgtttctgggactctgtacttagctctgaagccctatagcacctcattttccagcccccctcttttgtatcacctccacatctgcatatatttgtacatctcaggtctctcatgtaaactggcagagtgtttacatagaatgaacacaccatcctttttgtacacattgtcacctgtagacttctcataatgcctaatacaatgcaaattatatgtaagtagatgtcatatagtagtatttctatattgtatggggtatgatataaaaaaatctgtccagggaataaataaattgatggagaaaaaaaaagagccccaaaatatttggattcatcaataactggaatgcattatctagtgaactaatgagcatctgaatcaagtgatctcaaaggtccttcaaacctaaaaattaatgacttaggaactttgagacctaattgacgtaaagagaaccactattaatctggtacaaatagcttttcactatttttcatacaaatgaacacattatttattcagactctacatatttttcttattctttctatgtcatactgaatgatttttcatgtaaggcagtattttctgtataattaaataatttttataaacttttcatagaccacatggcatagattccctagctcccttctttttttcttacatttgttcatgtgataaacattcatattgtaacttcagcaaaaatggactcatagttaagaagaacagattggtaaatcattaaaaaaagatcaaagtaaataaaactaaaaaaatcccttaccagtacagttataattatccaataattaatatcagtgactgattaaatacatagacatgtaagccatatatatatggagggccagctacatatctgtagcttctagttagagacacagtcctcttctaccactcttttctctatctttttaaaaaaaattttattggatattttatttatttacatttcaaatgttatcccctttcctggtttcccctccagaacctcccgattctaccctgcctccttctatgagggtgctcacccacccacccacccacccactcccgcctccctgccctggcttttttctacactggggcatggagccttcccaggaccaagggcttctcctcccattgatgtccaactaggccatcctttgctacatatctctttgtccccttgaaccaactaaaagtaaatgagtaaattagcaaatggggaaatagtaggaagcccaataaataaagtaagccactctccccaaagttaaatcagtattttcaaatgcgttggctaaggggtttgtggaactaccactgtagttgacaggagattctagtgtggcccaagatcccccacccttactcctgcctctctcttctttactctatttgaacactggtagaattcatacacagaaactccatcccatatttatttgggatacccgaggttgctgtaacaaagcaacactcagtgggttaaacaactacaaaaccaggctgggtggcatgctcttatgatcccagtgttcaggaagtggagtcagggggaccagaaggtcaagttcatctgaggttacatagcaagtttaaggacagcccaagatacatgagaccccccctctttcacacacacacacacacacacacagagagagagagagagagagagagagagagaacaactatatttcttcacaattctataggccataattatgtgattaaggtatgggtagggctgattctccctggagcctctctccttggcttgcagatgtttggtttttgttgttttgtcctcaaagaaatatttctctgtgtaagattattctaatctcatgaggattcctgtcatactacattaggaccttccctaaaaaatccaagatgagcatgcatgagaaggactcaacttggcattcatttatagccaacagacagaaagctccaagccaggaaatatgtgtagtctgtaagctggaaccccaatctgtttgattttttgcataggtcatatgtttctcaaaacacaaatgacaatgacacaatgatgtgcttcaggcaagttgagagggtagctttaagtcctaaacagacttatatgcatttctggtgtcttcctggtctagacacaagcatcatgtcatctaaattttgcccccactgtgtgtgcctagtgctcatctctgggactggaacagattagatgtcaaatgcatgtaccaagtaagcaaaggccattctctccgtggtccagcagagaattctctttctctctcattactatgtgctttttgtattcttgagccactgaatgaactggtcctgacctgtaaggcacacatggtgaagtgaatttattttatgtatgctcatacactagctgtcttcagacacaccagaagagggcatcagaccgcattacagatggttgccaccacgtggttgctaggaattaaactcaggacctctggaagaacagtcagtgtccttaactgctgagctatctctccagtcctgaaagcctatttttaatgatagttcttaaatgctttaaccttccttttagcccagcacccatcaaaggtagtggaaaagaaagaataccggggaagtagacctgtttagaaaggttctttggagcaattcccatctgtgttgtctggaaattggcagtttcatttataggtcaatagcagcagctagatccactcacaaacacttcacggatacaccagtagtccagttcaataaagtctggatagcaaacacgagtcaacattggtggactacctagcagagacagccaggccccagccttaacacacgtcagcagtagggatcaggagggaggtcaggataaattctaggttgttcctcactaaatgaagatgcaagaccaacaactgttgcacagctagctctacaaccaagcctagctcagcctccctcattgtccatagaatcctatttataccctcaaaacattctgtgtcttccacaggttttgcctcggcaggtgcatctgtctcagctaatgtcactcagccaatccagcctgagacaatggaagtggcaagaaactgcagcaagctacagcataccattaggagttttttgtttgttttgttttgttttttttgttttgttttgtttctctctatggagtcttgacaaatggagctcaactacacaatgtaaagtggaccaatacatgcatgttgttagcaaagaatccttcgtcacgtgttctttcatgtgtttgctttagcagaacatcctctctcctgtgtctgcttcagtgaaacgttccttcacgagtctgccttagcctttcatctgtgtccacttcagctaaacactccttcacatgcttgccctagcaaaacaccatccaaccaactttccaaagaacccttaagtttccacttcggtggttcattactcctcaagaatgcctcactggaaaggtccacccagtcataactgaagttctgtctcttaggaaagcaaaaaatccagtcaagttgacaatgaagataaactgtcacaataaataattatgtttatattatttgtatcacttgctttccttattagtactaaaacaggtttccttctgattataaccattgataactttatgatgatagcttataatatgaccaaagtccattgaacagatttaaacttttaaactttaaatatttattatgctattattatgtgcacatgtgaaagtcagcagacaatgtgaaggagtcagttctctctttctaccgtgtgggttctagagatcaaacctggtcaccaggcttgcagcgagagccttgcaagcttagccatcctgctagcccagtaggcaactcatggagcaagctttctgagccctgatcacatattcaagtgcatgtaattagttaaacaaaatgagaattgatatgttgaacagttacggatatttaatatgtgctctgttaatgtgattttctctactaactaggaatttcttagcagtaattatttttcaagatctaaaagaattgagcttatagtacagggagtcaccatttaactcctctaccccagttttaccttcatcaacataaacgtacactgactgacacatctttaccatccaaagtgtacagtttgtattaggcttcattttgtgggtcttaaaacatgtgtaatgatatgttgccaccattatactaccatgcctcttgtgtggctcatgttcgttcttccctccctttaccactaatcattttatctgccttttccagtggaattgtatatagctgtagtcatctagtatatctgtagtcttctcagagtggctttttttttacttagtgttatgcaatgaagcttctaccatatctttgttattttatcactgaatgatacctcatgtctgtactgccacagattatccacttttgtctggaaagacaccttggttgctttcaagtttaggtaaataaataaataaataaataaaagcatcaaaattcttatgtaggtttttatggaaacattttttcagcttatatagatgtgaaccaaggagaaaaattgctggatcatatcaaatgacaacaatatgttttaatatggtaagaatgcaacaagttgagggcagtggtgcacattttaatctcagcacttcggtggtagaggcaggcagatctctgtgagtttgagacagcttggtctacagagtgagttccaggacacccaggactacatagagaaaccctgtcttacaaagcaaaccaaaacaaaagcaaccaaccaccaccaacaaaacagaattcaacaagctgtcttccaaagtgctgtgcccctttgcattcccatcagcagtgatctagactttgagtggctcctctgcctcataggtactttatagagtttgctttgcatcttattctaaagggtatatattggtctctcatggttgttttcacttacaattccctgatgacacatgggacagaacatcattctctgtactattttaacctatgtgttacatttcatttttaacacatgatagtatttggttttttgtgtgtaagagtgtgcatgtgtatgtgggcatgcatacatgtgcatctgtgtggaagccagaggtgagagccttgggtggtattcttcaggaaccatacattgttcacgagagaaggtctctcactgatcctggagcatgctggtcacaacagtctgtccataaacaatcaccaaacccagacactcaacaagagcttgctgataggagcctgatatagctgtctcctgagaggctctgccagtgcctgacaaatacagaagtggatgctcacagtcatccattggacggagcacagggtccccagtgaaggagttagagaaagtacccaaggagctgaaggggtttacagccccatgggaggaacaacaatatgaactaaccagtaccccaagagctccctgggactaaaccaccaaccaaagaagacacatggtgggactcatggctccagctgcatatgtagcagaggatggcctagtcggccatcagtgggaggagaggcccttggtcctgtgaaggttctatgccccagtatgggggaatgccaggatcaggaagagggagtgggtgggttggggaacagggggagtggggacgagataggggacttttggaggggaaactaggaaaagggataacatttgaaatgtaaatgaagaaaaatctaataaaaaaaacccaccttcatagccctgtcaaggttgtcacatttccaaaatatcaccttgtctgttttgcctattacttcttatttttaagggcaagtaacatgttttatgaactctaaaaataaaatgaaatagtttaatcaagaatcaagaaggtgaacttggttcagaccccagcttcttttcaagtaagtgattgtctaaaagattcactttctttttagaatctcagtgtgttctgtaaagtaaaaggaatgacaaagaaggtttcagaagttttgtggatttggtttctttctttctttctttttggtattcttcatcagctactagggtggtcatgttaacattcaggcatctgagcctttggatgcctcgtgatacatttatcttgaaaattttccatattttgtgtccaggttgaaatgaagagctatgaaagaggtggatacctagcaaccagatctcttgaaatatcacattgaatgcatttgcagagagtaccaggggagagtatagacagcaaaaaccatgcttccctgttaatttcatttggtgactcacccagtctgtcacgcaaagatggcattgatctaaattgtgaccttttcttctatctcctatcattaaaataatgccagtaaaagggcagtgactcaccacgaaaacagattctttttcagaaaattagcaaagcatcgtcacaaagagcttgggcgaagggcctttttattcaccttgcctgggcgaagggtctttttattcaccttgcctggtgagcaagcagcatcctctgcccagctcattaagtgcctcttctatattgtatcctgtggactcagtctagcctgttattttgttgatttgttctcattttgagcagtatttcaagccttgaatgcacaaggtaattttccactgattcagttgctagtcatcattgccttgtaattcaaggaggggcttaggggatttcttttacatcgtgaaatagtttccacatgtaatttgtggatcaagaatcttatatatgcatatacattaattgttgttttcgtttttgtaagtggttacttggagcgatgggaatgttgaaattattgcttttcagttactaaataagcacatcgccaagaaaagaaaccctagagtttggctcttaaaaataaggcctatcaattatatacattttgctcattatttcaacctgtccgctcctattaaagtatataccaaggcaatatttaaacaacaaccatcacttgtgtttcatttaagctgtatttatttctctagcctgccaaattctggaaggtaccagaacacaaggcttatatttcctctgtgaaataaatggtgtatcaatataacttggcaaaaatttatgtaaattttaaaccataatattatgtgttcctgaaaacattatgaatacacacagctgaaagtgacaatctcaaagtcatctgctgtcactcttcattgtacaggtgttaaggcgagaggggaaaagggagaaacagcttctttgtggtcttatgccagctcatgaaaatgcctagacaataactctgtcctttaacttgttaatatgttctcttgctagcttagcctttgacagcagaacgcccagagagaatgactctgggaaaatattagtcttatttggggaaaaaatgtacaaagattccagatggataagcccttggattaaaagggtatatttgaagatatgttaaaaatgacctcctattgctccctagtccttagtaaacaagatgtttttaactttgtgtggtttctataggaactcttccaaataggagaaatttcatgccctaacttaatgggcatctacttggatattatgatgtaaaacttactggatgtaagtctttcaacccattttacggacaatagtacattatgttgctatgtaatttagttttgaaaaggaatataagcattttcttacagtgtcttctgtaaaaagactttgctacatggtcccaccagtaacgtgtgactattggagtagaaccatctggtgactaatgagtcagttacttacttttaattttattagggtgatattaactcttggatccatgcagtagccacccaggatgcttctctcttttagacatttatttatagcagtggttcaaaatcttcctaatggtgtagcactttaatacagttcctcatatactggtgacccccaaccatagcattattttcattgctaattcataaatgtaattttgctactgttaagaatcctagtataaatatatgatatgcagtatatttgatatacaccctcctccttgaaacagtcttttgacccaattgttccaatccacaggttgagagaggctgacttttagcaacatgaacttacttccttctaaaagtttcattagttttacaggaaggctgccaaattaaaggtaaataactatgtttcagaatagtttgaagtgaacacttagggaagtctaacaatctgttgactcatctaatgaaagcaaagctttggaggctataaatagcaaaacttactgatttcaaatctccatggggagaagtctgtgcaattggattccaccagcatcacttcagactgcgtaattcttgagctcattttctggggagctgatgctgtgaagatgagactttaaatttctatatgtatattaatatatcaaatatatagtgattacagtctatctcctcaatgcttgggaagcagggaagcacaaaaagcagggtacaggaacacagaggcacccacactgaagatgataaatggcatgggagatactccaacagatgttaagtggtgtgttgacaagagtcaattctctgtgtggcacacagaagtcaattcttttagggggaagagcttcattcatatggcagagggcttcatatggtggaggtgggtgcctttcatgtaaattcaaaacacatagaataatagagtatgttatttagagttacatggatccatggaattattcagagtgtgaaggacagtagctgtcaaaagcaaattttgcaacataacttaaaaatgttttatcagcatatattaactatacacaatggggattttcatcatgattttcatatatgcatataataatgtattttgatcatgcttgccacctttaagaccccacttcactgtggggagcgggtgtggcggcagtcccaaaggcgccagggactgcagctaagtcatatgacttgcacctgacttcctcatataagacacaaacatcttgagtgctgcgcaggtgtaccaggatacaggtgaatccaatttggtggagatttgcccctgctgccctgattagctgaagcctcgtgactggcgagggggcatggcctgcagtgcgtggatgagagagagtataaaaggagtgagaggcccagggttcgggggagatatataaacaagggagatataaaaacaagggagatataaacaggggagatataaacaagggagatatatggagaaagaagaaacaggactgaataaatgtgtgcagaaggatcctgtagcagcgtcgttcttcctggcctgttgagtgcgcgcaacaagtggtgccgaaacccgggacaagaaacatcttcaggcaagagcgaagaccccctgctacagggaggattcagaactgcataacggggaagaaggggttaataaaggttcctgtgaaacagactgttgagaaggatctggcgtggattcagaactcttcagctggggaacggtactgatgaagagaaagaagaaagatgaagactgaataaactgctgttagaaggactggtggtcgcgtcgttcttgctggttgagagcggacgcgacacttcacctctcattcctgccgatccacttctccttctcaattagccccttctacttttatgctttttatttttgctgactcactgagtctcataaaggttatctacatgaatacgcgtactttatcagtaactgaagaaaatctctcctttccacagcaacttttcattgttcatagaatcttaggaaaggttaggctttgtgaggctattcccacctccattgccatgacaagatactgatgggcccaatcctgtatgggtcaaattttgtaaaatgtatgtgtctgtgaaagctggtattgagaccttgggtgctgtggtgctgactgaattattgtttgtgttgcagctctgaggacaaaggcttccctgatagacacgcttcagctctcctccggcaggaagaagatttctccatttcgagcattacaactctgatggaaaggtatggcagaaggagccaaggaataccacaaagtcacaccttacaacaaacctcacaaggagagaaacccaggaaggtggcttcctatgttctagagagaaacagcagagaactgggcagaacacagggttttgtatagggtttctagtggggtggtggattcgtggagacttccagagtgtcctgtcattggagggattataacggcctttatgacatttagaggagtctgggtggggggtgctagccattggatcttctcagaggcagaccctacacattggagctcctcaggttgggaaggagagaactgtccattggaactcctcagtcagggacctacatgttttcaggccctgacagagtagtctaggagttgagcctggttgcggagggtctccaggggtgggacttacaaaaaggagtatctgccccaggcagagaaagtcatcgccaccactcaagttgatgtgaatagtcaaccctttatgatttttgatgtgtttaaaatatttccaacagtttttcagaagaaagataaaaaagaaagtacctagtacctgctagtgtatgtaaaagaacatggtccataaatgaccaaggaaaatggtttgatctttctttcttttttttttttttttttttttttttttttttttttttttttacattttaaaatggactacagtatctgaactgtctactctctggacctatagccacattttctgactgcttcctgttagggaacagaagagtccagagagaagaggtggttccaaccagagtgtaccacaatgctaatggtttagggagaagaacattgcatatcagaactttctaggggagccttgcttaaatcttattggtcaggaaatgatctcatggtcctggccctggcccaaggactggactgatttcctaaatttaaagaaggtttcagttggaaggaaagggacagaggaacaaatggatgagtgagagtacctgccccaaatataagcatgaaagtaaagattggattgtagaggccagaagagaggtggggacactgtttaggggaccggcagcccattacctggaagagaaatgggaaaatgatgtctgctttcaccagggtcaatgcatagagaggaagcagttagataccatgttttaaacgaacatttggcacactagagcatagacctacttagggcacctgcagtttgagtacaggagtaagcccttcacacctaaccatgttttcaattaatagttaagaaaataaagcagattttaaagtaaaagtccataattcagaatgttacattttttttactttagaaaattagtgttattcataattaactgaaccaatgccattcatgaacacagccttatgatcatttacaaacatggttgttgggctcaggctatgccctaatctgttattatataaaacatgttttgttttgttttttcaggctatgccttgccttaggaaactccattgtaaaagtggcttttgactcaattttgagggaaaaggatgactggagcctctggatggacacagaaactgcaccacctgtcaggtagctccatgtagcatagaatgatgaatggctttttcctgggaataggaaggaagccactatgtaaatgtagggagagctgaaattatagggaaacactaggtatattaaaatcaaatcagggaaagcggcccaagaacttctcaaatacagcagaccaagaaaacagcaggttatatcgaggtgtaggtgtaaagtcacacaaggcctgaggactccaggagaggacttgttcatctgctgttgaggtagctacttgaaagcctgctgttatacctgttcacctgcctgttttctgttcctgacccacttcttgatttgaacacttcagccttttcctctgcagctaaaagtgtttcttcctcaaaccctgactctagcggctccagcaccagttccctccaggtgctggtttggttcaccctatttcgcaaacctcctgaactctgctgcagcctctttaacttgtattcattttgtaatgcatgtaaatgcatgtagaggtacagatacatgtactgtgtactttatgatgtgaatgttaatattattaattaatattggagtaaaaactatattcacccccaccaggctaccaaggtaagtgaattttatgatattactattattaaaactagtaaaccttgtgaatatattgctagtcaataacaatgggtttatgtgtgtatgtttctggaatagcacattcatgacaggttttttttttttttttttttgacaaaaatcttatctgtatcccaaactgctgtgaaactcactactttgcttaagatggtattgcaaatttggcaattcttggacttcaacctctcaagtgctgaaatttgttgctgcaagctactatgccttactctacagtgtttatatttattattcaatgtgacagtcaattctgggaaatacctacaacacgactcatccgcgtttcttaaattcagaaaatgaaaacacagagtaaagagaagttcaaagactatactgcaatgtatgtatgtatgtatgtgtgtctgtattgtatgtaccctgtccttctaggtcagaacagatccctatatggcaacagtgtcctgaaagacaaagttagattttatctggaccatgtagccagctaagacgctgctttgtcttccaccctctttaatatgcacagaatttgttattgtacatttcaaagtatcttcctatgttatttactgttgccatactttcacaccagaaaataatttacgttgttcacttatttttagacaattgcacacaatagtttggattcatttttaaaagcttatttccacagcacctaacacaattaattcaatcgctttttgaaatcgaggctgctttgtttcccagtgaaagcatgactcacaagggctgcctaggtctcatttatattcctccccagcaggtaatttaaatgtaatttatacagaaacagcaagaaaggaagaaaaagaaaggaggcaaactccccccccccttcgccccttgtttccctctgacaacttatcctgaatgtcagagaaagttgccacattgtttcctgcaccaaatgttcttgagagccacattggtcaatggcctgtgtcccaagtgaagaggaagtaagtggattttgggtcaatccaaagaaaccctttctttaaatgtgttttaaaaattatttttatgtgtgtgggcattttgccaacatgtatgtctgtgcaccacatgtgtgcagtgctcatggaaaccagaagaaggtgtccgattccttggaactggagttacagacagttgttaacctccatgtgggtgctgggaattgaatacaggtcctctggaagagcagctagtgctcttaaccactaagccatcctccagtatcaataaacactttttgatctgcagagacccttcagtttggtgccttcaagttcaggtggtattgagcatctggatgcaaatctggccgttatctggccgaggacagttattttgtatggatcttagcataatgaaggaagaggaaagaggctggcatgaggcatgagagactaggtcaaagtgaaaaaaaaagcagtgagctatggcaggatggagcatagtaacaatatctcaataagtgtcccacgcagttcccctcatttctctcttgagacttcttctctggggctggagaaatggctcagtagtcaatagcacatattgctcttgcagaggacccgagttccatttctagcacctacacctagcagcttacaactatttgtaactccagctccagggcctctgattctctcttctgggctgtgaggacacctgcacacaggcatacagaccctcacacatatacataattaaaataaaataaatcttataaaataggcacatttggggtctagagagagatgactcagtggttgacatgcactgactgttccagaggacccaggcttttgattcccattgctcacataacaagtcacaaccacccgtaactccagttcctggggatctgacatcctcttttagactccatgggcactgggcatgcatgtgttacatggacataaaatacccatgtaataaaaaaacttcttatccactttcatctcgtttttagtttcttgatctatacctatacttcccaaatatgtgtacacatatataagagataaaagcataccctatttatatatgtacacatatatatgagctagaatatggtatttgtgtgagcttggcttattttacttaagacaatgacccaaagtttcatcaattttcctgaaaatttcagaattctattttcctttatagcaatactcaactttgtctatgtactccattttttattcactcatttgttgatggaaatctaggctggttctttatcctggctactgtggataatgcagcagtaaagatgaaggtgcaggtatctctgtgctttgttgagtcctttgggtatgtccagaagtgggagagctgaatcatatagtaggtctatttctagatttttttaaaaagacaatatctacgctgatttccatagttactgccatgggatactgtggggagcagaggaagccctgagtaaatgtgtaagaagctgatgaagtcctgggtgaatgtctgttatttccttgagcacaattacatcaagggccctgatgcttcaaactcacaggaactggcaaagcttggcctgggtcaaactcaggaaattgtcagaaccttcctctggtacaaatatgagtatttgtgaatgactgaccagtctgtgctgaaacccagattagttaaacctgcccccttgttctgctgtgtaataagcccaagtctttatttattcagatgtataaaataaactcacagactttccaggttacttttctatatttgtatctgccctttcttcattttcttgtagctccagtcaggtttccaggaccaagacatacaggatgtggggtacatttccactagcagtgtataaaggttcctcttacctcatatcctcgtcaaaacttgggcttgtcagaaaacactacctggagagtgggggataaacagacaagtctaagggggaagacattgctgtgccagcactcacacaagaagcctcccggttatttccattggccttttctgaagcaaactaaaaaagaaacgccacattctttgtattcgcagaatccatttttctttttctttttttccattttttattaggtatttagctcatttacatttccaatgctataccaaaagtcccccatacccacccacccccactcccctacccacccactccccaaagtttggagctgagatgaaaggatggaccatgtagagactgccatatccagggatccaccccataatcagcatccaaacgctgacaccattgcatacactagcaagattttatcgaaaggacccagatgtagctgtctcttgtgagactatgccggggcctagcaaacacagaagtggatgctcacagtcagctaatggatggatcacagggctcccaatggaggagctagagaaagtacccaaggagctaaaggtatctgcaaccctataggtggaacaacattatgaactaaccagtaccccggagctcttgactctagctgcatatgtatcaaaagatggcctggtcggccatcactggaaagagaggcccaatggacactcaaactttatatgccccagtacaggggaacgccagaatccatttttctatacaagctttcttcctgagtatgcctgatgatcttttgtatctgtgctatccctcctttatatatttttcatagcttcagaaattcagtaactctgaaatggtccctcaatggaggctgagattgggtcaataagggttgttgaatattagagattagctacacatgtcccaggaagaccttgtctatccatcttgaacattatttcctaccacctacagcagtaaataaaagagtgactcacagtataataacaactccttcattattccttaatattttattcatcttctttatgaactaggggcatatgctaaaagaagatattgttctttctgaatccataataaacaacagcaattatctggtgaaatgtatctcttttccctatagggaatgagtgtttgcttcaggactgaagaaaatgaaaaattatgacatcactgaacccacttttaaaattaatatgaagcacttgtcacgaaaacatggatgtttgcaatagggaaatatgactaatgccaactaaatcagaaatatgaaagtgtcaggctgtcatttacctgaacaatttgttttggttttatacaagggagccctggaggcaattggcaattgcaaaaacaaattagaccaaataccaaaatcaaaaccaaacaaaaacaatttttgtcttccaaagttttattaagctgattgtattttcactggcttttactctgagtctgaaaccagtaaagaacaggaaagtttgtaatcgataattttagaattcccccctcctatatctcctttttctttctcttcatcaacataacctcttctaacaaaatataacatggagagtagttccaaagttttgaaaagttgcctgttttgacacaagtggggatctactcagaattgtatctagtgaatcaataacatgtggggttctttgtccttgattaatttactgacatttatcccagagtgaaagcttgcaatcccttacccattaataatattttccatttttgtgaaacacatgtaattgaagacccagctaaaatgtccaaatttttcttctgcaagtttataacttaactttgctatgtatttttgtcctaaaggttttgtcatctttattggcttgctcacaacagtttgaagtttcgaaggcttcacagaaatggtggtcatatttcgtagcctctatagtaagcattatctgatctctttgtatgggagatcataaaaggtccaactttataatggattgtgtgccatctttagtgtgtttctaaggcattattaattagattcagtcgatgtctacttcaacctaagtgcttggcatgccatgattgaattgatgaactctgggacgtcagatttcgaaataaagccgaggttatatttgtgcgtcaagattaaattgactcatttctaccacccaaagaaccagtgaataagtattgtgcagtgatttctcatttctcattccaaagtagagtgctagggccagtgtcaggagcacatcggagccaatcacatgccaaccaaagataccctggtgccatcagaatggccacaggtttgtaattgagccccccacccccaaatcttggctagctgtatttatatagtgacattcttttgagttcagcaaatcctacctgcatgtgtgttgttgaccaggtctctaagttgcaacagggtcctgaagatctggagatggataagataaggcattgtgtaattctaatgaatactagcagggcagaggcaataataagcaggcttatcttgctctggaagcacataaaggaagggaaagatatgatgctttgagggcaaaaggtaaaagtagattacttaggctacagggcaagggtggtaaaatctggagcggcagaaaacttgtaggaggcctgttgtgttccttcttattcaatcttagggttaaaggaaagaagactcattcctcagccacccctacatttgttggcttgggtaccaagtttctggcttcaaacactatctacaagctgagtgtggtactacacacttgtagaaataagagacaggacctctgatatataataagttcaaagacagctgtgtcagagtgtctcaaaacacaagcaaggtgctgacagagggctcagagtttaagagttcacagtgctttttccgaggacctgagtttagttccctgcacacatatgaagtgcctctcaaccacctgtaattccagctccaggagatctgacactgtcttctgattttcagatacctgtattcacatgtatatatccacacatagacacacacattcacatcattcaaaacaaacaaacaaaaataaaagttacagccatctgtgtgctactcttagattcacatatctatctaggccctctttttgtggacctcgggcttgtatcaccaacagagaaattctcatagctctttggttatgtaacaggcatgtcaaatgaaaccatcaccagagtttctccactgaacctgctccatctgaaggcacatctcagaaaatagcagctgcttaggccaaattcatggcatttaactgggcatcctctttatataccctaaatctagatccaattcatcaaccaagtttgtatgaattttactaaatagatctgcctcatgctaccatccatccatcccatcagcggttatcatctctcatccaatcactccagtggctcctggctgctctttctacttcttcctttctcttgaacaaaaaacattgggaaagtaagtacctgatatgaaaaatgaagtaaaatatatgcagtggattgggtctaaaccaaaggaagccagtgttgtgtgggtgcaagtagaacctctcattctgatgtgtatggagtctggacagggtagccagctatgttcctcatagtccctcagagctgaagcactaatcaatttttgcagatgattaagaattctgatatggccagagacagccacagtcctctcaaagtttgatgtgctgtagcttttaccagcttgtttggttgtttggaatcttatagtcccctattgttacacaaaacaaaaactataacaataaaagaggctatgaatataaaactttgaggacaactagacttgatcctaatactttttttaaaaaaattaatcggatttaatcactagaaagaacagtcctaaaacaaatatgattaactaaaaaaatcattttcttaaattctggcttttatttatatagcaagaaatcaccctgaatcattttgtcatggatatagagaggctgatgattttattcactccatctatcaacacacatttttagtgctagctgtgtggggaacaaaatagactcatggaccttcatggaatttgctgtctaatagttgacatatatgtgggctaaataatatgataaagatgtgaaagtgtaactctccatcattaatagtttctggcaagggtgtgagtgggaaagactcagaattttttatgtgttggccatacgataccaatactattaaacttcacaactgaaacctagtagtgatgtcagagcctttttagttttgagcatcacattttgtagattgaggagcagacttagagaggtgatattgtttagtgtccctcgggagtcctttcctataccttcatctacaccactatcgttctgagccttgcttttcaggttgtgtgatacaagctctcaacttcagtttgtttgggagtcagtgaagtatgctgaaatacttaagagttaaggttttttgaatagtaataatcttgaaaacaagtcaacatcttattacccacttcccatggagttgaagtatttttttttttgaggttaagtgctctaatcatttacagtgtgattctgtaaaggagttgatttaaggctttactttgttttttttgcagccgtggtatttttaaatcaataaattattcacagtgctagcaaaacatgggggccgtacatgtatgctctactatcaaggcaaggctaaaagcccttaatatataaacatggggctgtacctgtgtgctctactgttatggcaaggataaaagcccttaatataacaacacattgtaagttaagtgaaaatcatttaaaactttatacaaaatggattggaaaacagaatataacagtaacgggaaaagcaattatgggtccataagtctaaatgggctaaaattgcccaggcatgtgtaattatgtgtactaactttgaacctctcaaatggaacattcccttgttactcttggaacttttacatttggggagatatgaaaagcactgagaaaatgacctaagtcacatcagtcactacatgctagccagaagcttggcctgcttttaatgtcaacaaatataggtacttgttaccatactttaaaatctgagttcaactccttggctccacatggtgggaggtgaaaattgacttctgaaagctgtcctttgacctatctaaaatgtccaaatgtcaaatatatatgcacaccattgcatgtccccaataaaataaatgcagtatttttaaggaagcatcttagaaaacacctactgtgtgccttagcactatgttagaaagggtgagagtcactgaagtggcaattatcatctgttaaatcagaagagattaaataagacattaccagattacagtcaagtatgagttggaaaaggcatagtctttggagttaagcagaactgtcttcaaatcttacctctacattgtcatagccctaaagtcatataaggcagtctagatttcctgaaccttgtttttctcatttgtcagttgggcttaaaatgaggacaacaggcagctgtatgcagctgctctctctttcctgccttttgcaaatgagcacaccacactggttggcttaagttgcctgtgctacatgactgagaattctttctatatcagcacttgagaagtatgtgttgagttgggctggttagataaggtttctggcagaaagcctgtcccttgcacagatgcgaatgtacggaagcaggaggttccctgacctaaggactcctcttcaacttgccattttttaaaaaagattgttgtttgtttctttgagacacggtttctccgtgtaagtctggctgtccagaaactcactatgtagaccaagttggccttgaactcacagagatatgcctgcctctgtttcctgagttctgagattaaaggcatgaaccactatgcctggctagatttatttatttctattttagtgtatgagtgttttgtctgtacacttcatatgtgcagtgcctgaggatgccaaaagggagcatcagatactttagaactagagtaagctatcatgtgggtgctgaagatcaaaataggagtcaatgccctgaaaaaggggagaaaaagaagaaacacatactcatgggaacatgctcaaattccccatggctagccctttaaagaaaattaaaaccttccccacccagacaccctccagaagccatcaactgtggagagctatacttcagcatctttatcacagttttaggagttttctttgatggctttctgtctaggctgttacttttgggggtagggggtagggagatagtggttgtcacagaagtcttctgtctatgtctgtctttctcaactgtgagtctgcagtaatcaataccatgtaaaagtagcttccttgacttttatagccagcagaagcatgggtcaggtttctgacaacagcacagacgacggacatccacatggcctctggtacataccatgggcctcagcatggtcttgggtaacagtatcccataacattaacacaaccctctatgggaacactggccaaggacaccatcacagccctcagcagtagcacaggacggggacatcaacaggttttcaggtggtggctcaacatggccctcagtggcagcttagcccactcacatcaacatggcttcatgctgtagcacagaccatagacatctacgtggcatttggttttaacacaggccacggacatcaaaacagacttgtgctgcaatcgaatcatagacatccacatgagtctccagcttcaacacagcctggagcagcagatcatggatactaaagtggcctccagaggcagcacagactatagaggtttttcaaagcagtccaatccagaacacaaactgctcttcatgctggacatcctgtaattactcagaactactcactgcttggtccctccatctttcccacatctccatctcatagtcattcatcatagtggcattggaaaccgtagtgtgtcacacagtactttttttttttttgtccaaacacctttacattcaaatatccattgcaaccagtcattggtctggtgcaaggtttctggtttttgacccaccataaatactggaccatcactgagactcgtcacagaaatcttcctgttgtccagaattgtggtgatcttgtgcctagccagggtatttagggacactttttgtttgattttcagaatgtcacatccttgacgtcatctgccccaggctctctgtcttccagcaaggcaaccagctcaggttgcaaccacagtgtctactgtgggctgcttggtggactggtcattactggcctttttcagtactgacttctgggtctgtaggaccggctcctccactcactccagaagcttgtagatggagtagctgttgcggtggcctgactcaaagtgctggacctggagcctgatggcggctgagttggtcagtgtgagcatgactagggtgtaggtgcgtgaacttctctttcccaaggcaaatcttatgaaaggaagcatataactggggcttgcttagggtttcaaagatttaatccattatcattcatgatgaagggaagagtggcagctgaaagctacatcctgattagtaggcagagtcttatcaaagagtgccactccctggtgagcaagcattcaaacatatgagcatatggggaccattcttattcaaaccaccacaatacgtttcgcaaaagaactaagaggaagggagctgtgacatgtcctgtaacagagatgactaaagaaaatatggtgctcagtgaaataagccaggtactaaaagaaaagtactgtatgactctatttctataaagaactcaaagaagtacaatttctaaagatggaaaatacactaagaattaaaaggagtatggggagggagtaatggctctggggtgatgaataggttctggtggcatggaagtgtggacttgtgtgtttttagaggtggttgctggtgctgaagttatagctcactggcatagtgcttgtctactgtgctttaatacttgggcttcatcaccagtactaaaagaaccatggtaaatatgatagaattttatgttatgcatatttcagcacaactttcttttaaaaagaaaaaggagatgccaggctggttgaaaggcctgaacaaaaacatcactacatggaagttaagcaataagttggttcttcattgcaaatcaaaatgactctgggattccatcttatacccttcagaatggctaaaataaaaaaatgcaagagatatcacatgctggtgaggatgtggagaaagaggaacactcctctattggtggtggcagtgcaaacttgtacaatcactttggaaatcaacttggcagtctctcagaaaattggaaatagttctaactcaagacctacctataccattcctgagtatatacccaagagatgctttactataccacaaggacacttgttcaactatgttcttagcagctttattggtaatagacccaagctgtaaacaaccaagatgtcactcaaccgaagaatgaataagaaattgtggttcatctacacaatgggatactattcaggtattaaaaacaaagacatcatgaaattcttaggcaaatggatggaactagaaaataccatcctgagtgatgcaacctagacacagaaaaacatgcatggtatgtactcagtcacaagtagatattatctgcaaagtacaggtaaccatactacaatccacagacctaaagaagctaagtaacaagaaggccccaagggaggatatgtgaatctcactcagaagggcaaataaaatagacatcagaggtgggtaaagggaaggaattagatgggagaggggatagggaggggaacagaggtaaggatcggtgtgagagagtggaggtagaagaaagctgagagagagaatggaaatcagtgggcctaggcatctctgggacaagctggagacatggtcagggagaggttccccggaatctatggtggtgaccctagcagagcctcctagcagctggagataaggagactgaagtggccacctcctgtagctaggtgtgacttccactggagagaaaaagcatcaacaaacttctggtggtgtcctgcagtttctttctgcttcagtggacttgggctgattggcagagtgttgtcagctgagaaagacatggtgacttgatgtgtgggggtgggtgatggggttgacacctggggggcagaagaggaaggtggaataggcagagtcttgtgctagggtgtcctgggaggagaggaagggctgatatagcattgtaaagtgaataaataaataaaatttaagaacaatttaaaggtataatgaatccctcagaatgtgatctagtcttagaaatagtgtctttttgtgtggtgtgtgttcaggtgtggacacatgtttgcaggtgctcacacatacgtgtgtagtccagagccttggatgtcattcctcaggtgctgtgcaccttgtttctttgagacagagtctttcacttgcatggaactcaccaagtaaccaagactgctagccatttagccccaggaacccatctacgtccatgttctcagtgctggggttataagtgtgcaccaccctgccaaactttttacataggctctgggacttgaactctggccctcatgtttatatgcaagcacattactggctgagctatcttagtaatgcaagcctctatctctgctcattctttgagcagatagacaggttttagaatggaaagaaagtgaaggccaataagaaagggtttctttcctaaagactgccgggcagttctcttggttcaggggtcacgttgagcttcctcagctcagcgattcattgtataccaccagtgggtctgtgggagaggataacctttctgcttcacacaaaatctctaatatattcttatcacagaggaaagcagtatgtagtgctaggctggaggggctattctgaagaactctgaatgctaaaggctgagtcatacggacactccatgctccctaatcagtctcacttggctagtgctaagtccatcaacagcctctcacctcctctctgttcattacgaacagttagagtgcctattatgggagacacgtactgtcatcatcagcctagacattaaattaggctctgtgcatagttggtcaaagcacctctcctcagctcatcatgatctctcaactaggactaaggaaattgctgtctgattattccattcagccccatcagttagggagccttttcccattctgtatggaaagactgcaccaaaacagggctttgtccaaaaagatccttacaagtgaaatgaagagtcgttcaaagtggtttgggggacaaacttaattttacttcaccaaagtatggtgtctttcttatgactgcttttgggatgaacttctcagcactgaagtcccagcttctgaagttctgcagaagagacagcagttgtagtacgcagccatggcggtggcagtgacacaggattgctaattaaatcaaaggttttgtttttccattgcaacgttttaattttcttttggaggtttggttgattttgtttaaaaaaaacttttatgtgacacagtgggcgactatacataagaacaggagttggacacatggatattaagtatcctagtctctaagcttagtatcatatactatgaatatccctcatatactatgaatatccctcaccagagaggcatgattgttacaaatggattcttcattatgcaccttattgaccatgctaatgaccaaacacagtgatgcaatcagtgctcacatagctgctgagagcttaaggaattatgtaatgtaactgaagccctgtccactgggtcgtcagtgattgtattctgctaactccgccacaaggtaattactattctcattttggtgggtttctttcccatgcctttccccactcactcaattaatatttatgtgtctctgcatgctttcaaatctcacaaaacgatacaataggaattaccttcctgcaacttgttttagttactcattatctgtttttaagaaactcaacgctgttgcatcttcctgtggccattcatctaccttttgatggatatttggtgcttgcaaatttcttactttaaaaacatgtatttctcttcatattgttatatattactgcaataatttctctagggtacactttgctcttctttcaacattaaaataattttgatcttatataaaagttacaaggataatagttcctatataatgttcactcagcatcaatacctctgtacgataatcaaataaaaataacattgatagtgatatcactaatctacataccttataacaatttaaacagaacagtattttccaaatttcctattttgcccacacattgaaatcacctggggaactttaaaaactattgatgtttagggtatcatcccctaggatagtctcatttaattttggttgtggcatgggtaatggaaatttaaaacactccaggcaattgtaatacggagccaaattagagaaatgctgcattagtagacagtgaaatcaatttaactgatcatgtacaaatattttaaaatgaaaaggggactgccgagataacttagtggctaaaaggcactaaaggctactaaagcacaaaggacccgagctcagtgcccatttcccatcgtaatagtggagaacagacacctcctgcaaattgtcttctatcctcacatacatgctgtatcacacatgtgccccccctctctctctcacacacacaaacacacacacacaccacatcacacaccaaaaaataaataagtttactactacattggatttgtggttggagagacagatcagtggctgaggcacttgggctcttgcagaggatccaagtatggcttccagcacccacatgatagctcacaaccatccaaaatgtcagcttcagggtttctgatgccctcgtctggacttcccaggcactaggcacatggtgttcagacatatatgtgtgcaggcaatgcattcatacacataaactcaaattaaaaattacttttttggattttattgctttgacgagatcaatgtagagtcatacacagtgtcatgtagaaacctcttactgggtcaaccagatgcttcagcagattatggcatggctattacgtctgaggacctgagtgtgatccctgaattcaatgtaagcgtaaaaggagagcactgactttacaaagttggtctctgacctccatagaggtaccacggcatgcgtgcccctggattttttttttccagaatttaaaaaggaagtgtttaaaaagaaatctcttgttctttgctcaatttcacttatcagtttccttgctagagcagagcaaggacagggagagacagaaacagagagctgtttaaattgaaagagagaaatatacacagagagggaggcagagagacagagacatgcacagagagacaaggagggggaaaatatgcagctttatctcctaagtatgtaactacatccacactgaaggcaataataaaacattcttccacaaccacaaggcttactctatgtacccagaagcacctccaaccagtgactctggcaatgactcatgtgtttgacaccctgtgatgttgtcatttcctacatgaaagcaagcagcatgtgacttttcagtgctgacatttgctggctcttctctgtgttattggcaagtacaagcaatggtatagccaatcacccagtgaaggccatctggcttgtttccagtttatggttattacaaatcaagcttttataaacatacctgggcaaggtttggtatgagcataaacatttgtgtctccagggcaaatgcctaggatgaagctttagttttataagaaatagccagtggaatcactgctgggaatgaacatcttcagccaggttttgtgttggcagcttttaattttattttagccactgtgatagatatgaattgatgttagaatttcctcttctttgtggctaatgctaatccacatcctttcatatgatttctttttccatttttggtagttggactattatttactgtaaagtattgagaactgcttcaatatgcaaactctaaattctgtgttagatgtgagaacattgcctttcagttcacagtctgtctttcaatccctttcacataggttttagtttttaaaatttaattaaaaccatacgttatttcatgtatagcagtgtaggttccattttaaatagcagcatgacagaatgacttagatttaaacagaagaataaagggaaaggttttaggttacaaaatccctcacctaaaacttctttttttaaaaaaaagtcatgtttcttaagtgggttgtgagacaaatgttttcagtgactacctatgtcaagttcccattgtatcaattgacctaaaaagacaggccaactttcactaccatggcctcaaaggaataagaaatgttagattatttttagatgcaaacaaaaataaattaaggaaggaaagaaggaaggaaagaagggagggagggaagaaggagggtgggaaggagggagggagcgagaggggatgttcatgttactctaatactcaggataaaatttatgatgagatttaaactagaataaaaaaatatcctattttatgtctcatttgctatttttcctatattctgtccttccccctcatctgcagtttagactccacctacacttgtactgtttacacacacacattatgggctaagattgcatatgcagaaggatctctctctctctctgtctctctctctctgtctctgtctctctgtctctctgtctctctctgtctgtctctgtctctctgtctgtctctctttctatctgtctctgtctctgtctctgtctctctcttccagtttaagttctctttcttaattcagtctccaggtacattcatttccctacaaatttcatttctctttatagttgagtaataatccattttgtacatgtgccatctgttcatctgttgatggacatctaggctaatctcattccatagcatttgtgaatgttgctgtgatacacatggattaaaaaaaatctccatgatagtttatggagaccttttgggatatgcacagcagtgggacatctgggtcatgtagtatttctatttttatccttttaaactgattttcataatggctggattaatttgtgctcccatcatcactgaataagcatccctctttccccacatcttttctaacgtttgttgtcaaatttcttcatgatagctattttggagtgaagtaatagcctaaatatattttaattttaatttctccaatgaacacaatgaccatttgtgtttcttcttttgaggtctgttcatttaaacagtctatttgcttatttgcaggagggttttagtgtttattttatttattttttttttgccattccttgtaaattctggatattagccttctgtctgaagtacactggtaaagatgttgtcctagtctatgcgctgtatgatcagctgacagtttctttacccattgtgtggttacattttgtcaatttgacattgaccaaagtcacctgggaggagggtacttcaactaaaaaaatgttcccatcaaattggcccataggcacacttgagtagcattttctttttcttttcctttttttttttttttttttgacgtggaaggtccagcccattatgggtggtgccacccctagttgggcagtccagggttctataagaaaacaggtggaggaagccattgaaaaccagagaataagatactctcctccatggagatggatcctccctctgcctttactgcaatgatgaaccctaatccagatgtgcaagccctttcctccctaaggtgcattctgtcatgatgtttcattacagcagcagagagcaaactaagacgcctatgcagaaacattcacttccatgcagtcccatcttgctgatacttggggctggtgcttgtgctgttaagagttctgttcagaaggttcttgtagaaaactatatcttagaatgcatgccctgttttcaactagcagttgtagcatagcaggttttaaattaaacctttgatccagtttactgatttttgtgcagggtaaaagatatggatgtaattttattcttcttcaggtagacatccagttttgtccttattgtttaaataggctttataaatttcatgtttttgccacctttgtcaaaaagtaagagggtagactggagagatggttcagcagttcagtccactttctgttcttagagataagtttgcttcggtttccagtgcccacatagaggctcacaaccgcctgtgacaacagttctaggggatccaatgccctcttcttcccaccatgggtaccaggtctggtgcacacatgcatacacacacacacacacacacacacacacacacacacacacacacacacaccactcttacatataagattaaattaaaaatctttaaaaataattacgtagccatagccttacttctggatcctctattctgttacatccttctaactgtctgttccttatactttcttactgtagtatagtttgaggtcaggtattgtgatacctccagctgtgttcttactccttagaatcactatggctatttgtcttttgtggtttcatatgaattttcagattatttttcctctatctgtgaattttaatgtttattgtattgaataattgcaaaactgttttgctagtataatattgaatctgtagattactaattcgtgatattaatgttgccagtataggaatatggaaacctagtggtttcttttaaaataccttaaacatttctctgtaagagattgtacacttatttgactacacttctttatatgtatttctcagtacagttataattattattattatactggaactattataaatgtgattttttttctagtttcttttcctgggtacatatgaaggccactgtttttatactgcaactttgctatattagattgaagcgttttctagtctatcttacagtgtctttcaaatatatactcaagtgatctatgaataagtatgatttgacttcttttcctgttttatctcctatatgtcttttttgtgttttctgttttagctaaaactttgagcacagtactgaataagacaaatgagagtgagcaccctcatctccttcctggtttttaaaaactggtctaatgtgttatttaattgttattttttatttattcttctctcatatatttcagccttactttcgtatatatatacatatacatatatatatttaattctaactgcagttttccctccctcctcttctcccagttcctgttcctctccctacccccacccactcttcctccatttctctgcagaaaagaggaggctttccagtgatgtcaaccaaacatgacatatcaattgcaataagactagggaactctcctcatattaaggataaatgaggcaacccaaagctcgattttagcataatgttggctatgtttttttggtatgtagtctttattattttaaagtatgttccatctattcctagcaactccaggatgtttataataaaatcatattgaactttgtcaagatgattgtgtcatctctgttcttcagatgatcatattgctttgctttttgttgccccaattttggatccctgtgaaagcccacttggtcatgatgtatgatcttcttaatatgttctggaatttaatttgcaaatatgttatttagaatttttgaaattacagctatcaaagaaattggtctgtggttttgtttttgttgttgttatgtgtttacctggttttggtaccaggataatactgactttatagaataaattaggctatgttccttcctaccatttctattttctgtaaccaattaaggattgttcatctttgaaagttgcatagaaaaacagagaaaacttaaacattgatcaggatcagtttattattactttttttaaatatcaaacttccggtgtcaagactaataataattctttgcctatcccaaaatctcatattattctttttaagaattcaaaattctttatatgtctgtgcatgagtgaaggtacctcacagaggccagaagtgctaaatcctgtaaagagctacagttacaggcagttgtgagatacctgacatagttgctgggaatcaaactctggttctctggaggagcaatgcacattactttttaaaagtccattaattaattaatttattcactttacatccttattacagctccccctctcctcccagtgcctgcctcacatagcccctcccaccatacccctcccccatctcctctgctactcctgagcaatctctttatctgtctcctattctaacacttttatagtttcatgctttacatttaaacttgctgctcattttgacttgctttctgtatgtggtgtgaggtggatcattgttgctctctctcagctcctgggtttggggggacaattccagcaattaagttacttgcatctggttgacaggtggcacctacaattgatttcaaatagctcagcccctcctgtaaactttcaacttcacaatatcattgtgtgaaagttaacctcaccctcattttacaaatataaaaatcaaggctttgagaggttagcataacttgtccatggccttgcatttgactgcactttaaatacagtgtcaagttctgctattttattgctgttactgtgtttaaggacttaccttgcttttcctgggtggtattgctactttcattttcttgcaatgttttttgttctgttaggggtaaaactagcttcataaagtgcacgcaaacttcctatagtctctcaaagcaactgtggataatcagtgttaattctttaaatctttactagaattttccagtgaaactgtctaggtctgatgatttctttcctatgggtttcaaaattatgaatttgagttatctaatagttttgcttgttatttacagtttgtcatattgaatgactcctggaatatttatataaattatccatttgagcatgtttttgtgtgtcttcagcatatttcatggatgtgtctcattttattcttggttttgagcaattttgatgggttttttttttgtcacttgtatcagtagttactcaattttattgatctttgcaaaaaaacaattttctcttaaattgacttttctagatttttctattttcagtttcattgattctgttgttgcaattatgatttccttcctcctacttgctttttctaaagtgtgttttctattctgatagcactgggcattagttctacaagccctgtcccatagatgccaaaaataaaccacaagtgacagaatacttttcctaatatgaatgttctaatatgtgtgtttcatctttcctaatgtgaacgttctaataagcatgtttcttctttttctgcgttctgcacattttgttatattctaattttatttttataaaatctagtgtaccattttattatccggaaacatcctcttggatccatgatgatctataaatatgctgtttagtttctgtctattcatgtaacttttactatctttctaatgttcatatggagtccaactccattttagtcagaaaacttttaactagtttagcttccatgcccaatcttgtaaatgtaggagtttggttttgtcatctcgtgtctgtgttgaaatcttgctgggatttttctatgactggaatctacagatcaattttggatttttttaaaatttaaattaatttttaatttatttttatactccatattccattccccaccctaccccatccaccctctgtctgctccacatcccacacctcctccccacccaccctgtctccacgtggatgtctccaaccccacccaacctgacctctaaactccctagggcctccagtctcttgagggttaggtgcatcatctctgcatgaacacagacctggaagtcctctgctgtatgtgtgttgggggcctcatatcagctggtgtatgctgtctgtttggtggtctagggtttgagagatcttggagttccaagttaattgagactgctggtccttctacaggattgccctattccttagcttctttcagccttccctaattcaacaacaggggtcagctgcttctgtccattggttaggtgcaaatatctgcatctgactctttccggatgcttggtgggtctttcgaatggacagtcaggatagatccctttttgtgagcgctccatagcctcagtaatagtgtcaggcccttgggcctccccttgatctggatcccactttgggtctgtcgctggaccttcttttcctcaggatcctctccatttccatccctgtaattctttcagacaggaacaattatggaccagagatgtgactgtgagatagcaatcccatcccccacttgatgtcctgtcttcctactggaggtgggctctaatccctactgtcagacatttcatctaagatccctccctatgagtcctgggagtctttcacctcccaggtctctggtgcattctgaggggtttccccaacctcctatttcctgaggttgcctgttgacattctttctgctggccctcagggcttcagtccttttccctcacccaataccagattaggtttccctctaccccccaactacccccccccccaggtccttccctccctccccacttgtgattgctttcttctctctcccaacagaggcctactcccttgggcccttcagcttgttgaactttttgagttctgtggactgtatcttgggtattctgtacttttttttttttgctaatgtccacttattaacaataccatctttcatgctgcagagctgacatattaatttaattagtgctttcattttcatttatttcattagtgttgtatggttttttatgcccatagaccctacacagattcttttttttttttttttttttttggtttttcgagacagggtttctctgtgcagccctggctgtcctggaactcactctgtagaacaggctggccttgaactcagaaatctgcctgcctctgcctcccgagtgctgggattaaaggcgtgcgccaccacacccggctcagattctttttttaaatttttttccttttttaaaattaggtattttcttcatttacatttccaatgctatcccaaaagtcccccatgcccttccccccactctcccccccactcccacttcttggccctggtgttcccctgtactggggcatataaagtttgtaagaccaatgggcctctctttcccctgatggccgactaggccatcttttgatacatatgcagctagggtcaagagctccagggtactggttagttcataatgttgcacctacagggttgcagatctctttagctccttggatactttctctagctcctccattgggggtcctgtgttccatccaatagctgactgtgagcatccacttctgtgtttgctaggccctggcataatctctcaagagacagctatatctgggtcctttcagcaaaatcttgcttacacagattcttaggagctaaaattaagtctttaaacttttaatgcctttataaatagtacataaaatttccaaattctaataacttattactagcacatggaaggacaattaagaagcaattcagttaaattaaattaaatccagtaattctaagatgaattttggtatatttcctggagttgtctatatagatatgtcatttgcaagtagaaaacattttgtttcttccttttagaactgttatcctagaatcaacaagtgaggttttataagttttaaacagttttgcacagcaaaggtaactatcagcagtgggaacatacaggctacaaatcaggagaaaatctctgctatatgtcaggcagcacactaatctctagaatatacaaagaactgcaaaaaagtaaacattgatacacaaaactgccaataaacaaatacggttatcaaatgaacatatagtattgttttagaatgttcatcatctttggccatcacagaatgcaaattaaaactactttgagagtccatctctctccaataagaaaacctatgccaagaaaacaattgttgcctacagatcaaaatgtagaaacctcagctccatcttcagcaccacatctgcctgcttactgccatgcttcctgttatgatgacaaggaactaaacctctggaactgtaagccaaccccaattaaatgttttgttttaattttgggtgtcacttatgtatgctatcatataatctacaaatagtgataccttgacttcttctttgccaatttgtatcctcttgatctccttttgttgtcttatggctctagctagaactttgagtactatattaaatagatgtggagagagagagaaaaaaaagagttgtgggaatggtgtctcttcacagcaatggaaatcctaactaagacagacatcatacctagctttgcattttttgctttagaataatacaaaagtggtttatattatgtgcttcatcagactaaaaatcaagcaaaattgtctctattacacagtaaaattgcctacttaatatgctctgacctcacttttcatccattccctacattaagcagtatacttcaagatcattcaatatgatattattaccttccacaataaatgtcttttctctttctttgttcttcccggttaatgaaaattctgatctttattacagaatatacttgtggcatcacatctatataacctatagaatgagatgcaatcataaacaacaaaagactttgaaaatgtatcacatttctaggtttggagcacaggaaaaaaaagatagctgctttactcttgggtgtacactcacccttcctgaatcagatgaggcaaatagaagtccagcttacaaaaaggcagatgtcaaattataccagaatttccatgttatgctgtgatgactgcaaggtgtactatctggtgatcattttcaggaacttttgcaatgccactagtttgcattttagaaccaaaactattctttcacttctgggccataaatgtatggaatactgagagctaataattcaaaataaaataaaataaaataaaataaaataaaataaaattaaatatattttgaaatcctaactcccactaccccagagtacaactttacttggagataaagtttttacagtggtaataacgataaaattattggggcatactgtaaaccattatgacttttgtattcctagaaaagggacagagagaagatggttgacataaagactcaggaacaaggcatccatatgtgcaatgcaaagaggcctaggaaaaagctctctttctcacagcctgtcagagccaaccctgttcgaaattgatttgccatttataacatagcctttagaaatgggatttctattttcctcctcctcctcttcctcctcttcctccttctctcaccactaccatcaccaccccaccttatccatcaccaccaccactatgtatttggtagtggtggtactggagattcaacaaaaagactaccattatgctacttgcagatctgaatttatgtattcttgaagcctcccaaatctccagtaacatattatagtagccctgactatctgttttacaggctcttcctgagggtgcaatgatttccctctctagtcaggggaaattggatctgttgtttctttccagcacctgctatatgtgtgagggaatctatggggcatgccaatgaagaatgagaggaggaagtcctggagaaatgttctccaggcaatgcagagaccccaacaagtccaaagcttgcaattttctttctaaattctttcccaagctgatcataccatattatggttttgtggtcagttatattttttctctggtcctggagattgaacccagagcctatgtgagtactgtgccataatacttgttttaaagaattttaactctgggactggagaggtggctcagtagttaaggactctagccactcttttagaggacttatgtttgattccatcacccacttatcaactcgtaactccagtgccagtggatcctactccctcttctggcatccatgggtgctggttgcatgtggcacacagacttacactcaggcaaaacacctttacacaacaaataaaaatgagtaaattattttttgaaaagattaattttgatccccactataatgaaagacaaagttcactacacctaccatttctgtaaattgcagaatattgtaatgcatgctagtgtttccagggttgatgtggcctaggcaaccctaacaagttatatattgctctaaataggctaattaaagagacaaacaatactagaaaacagagaaaaaaggttgatttaatgtggtcacattgggaaaaggaacaaataaaaggtttatttaccactcccttcccaacaagcaagaggcatgcatagctatagaccaggtggaggtatggttgtgttcatcattaacttgtcaatgttttagattccagctgtcctgcagggtgaagtgagaagtcagacctgtgtgataaatctttctgtaagacgagctgccctaccctttttcttctcccagcatgagactcctggaggaattattttttaaattttatttatttatttatttatttatttatttattgcctttgataatttttttaaattgggtatttatttcatttacatttccaatgctatcccaaaggcccccacccgctcccccacccacccactcccacttcttggccctggcgttccactgtactgaggcatataaagtttgcatgaccaatgggcctctctttccactgatggctgactaggccatcttctgatacatatgcagctagagacacgagctccgggggtattggttagttcatattgttgctccacctataggattgcagatccctttagctccttgggtactttctctagctcctccattgggggccctgtgatctatccaatagctgactgtgagcattcacttctgtgtttgctaggcccaagaatagcctcacaagagacagctatatcagggtcctttcagcaaaatcttgctagtgtatgcaatggtgtcagcctttggaagctgattatgggatggatccctggatatggcagtctctagatggtccatcctttcgtctcagctccaaattttgtctctgtaactccttccatgggtgttttgttccaaattctaagaaggggcaaagtgtccatactttggtctttgttcttcttgagtttcatgcatttagaaaattgtatcttatatcttgggtattctaagtttctgggctaatatccacttatcagtgagtacatattgtgtgagttcttttgtgattgggttacctcactcaagatgatgccctccaggtccatccatttgcctaggaatttcataaattcattctttttaatagctgagtagtactccattgtgtaaatgtaccacattttctgtaaccattactctgttgagtgacatctgggttctttccagcttctggatattataaataaggttgctatgaacatagtggaggatgtgtccttaccggttggaacatcttctggatatatgcccaggagaggtactgcaggatcctccggtagtactatgtccaattttctgaagaacctccagactgatttccagaatggttgtacaagcttgcaatcccaacaaaaatggaggagtgttcctctttctccacatccttgccagcatctgctgtcacttgaatctttgatcttagccattctgactggtgtgaggtggaatctcagggttgttttgatttgcatttctctgatgattaaggatgctgctaatgtgtgctctccctagtttctttttggaggcactcagagctatgagttttcctcttagaaatgctttcattgtgtcccataagtttgggtatgttgtggcttcattttcattaaactctaaaaagtctttaatttctttctttattccttccttgaccaaggtatcattgagaagagtgttgttcattttccacatgaatgttggctttctattatttattttgttattgaagatcagccttagtccatgatgatcttataggatacacgggacaatttcaatatttttgtatcttttgaggcttgttttgtgaccaattatgtggtcagttttggagaaggtaccatgaggtgctgagaagaaagtatatccttttgttttcggataaaatgttctgtagatatctgttagatccatttgtttcataacttctgttaatttcactgtgtccctgtttagtttctgtttccatgatctgtccattggtgaaagtggtatgttgaagtctcccactattattgtgtgagctgcaatgtgtgctttgagctttactaaagtgtctttaatgaatgtggctgcccttttatttggagcatagatattcagaattgatagttcctcttggaggattttacttttgatgagtatgaagtgcccctccttgtcttttttgatgactttgggttggaagtcgattttattagacattagaatggctactccagcttgtttcttcagaccatttgcttggaaaattgttttccagcctttcattttgaggtagtgtctgtctttttccctgagatgggtttcctgtaagcagcaaaatattgggtcctgtttctgtagccagtcttttagtctatatatttttggcaggagttgagtccattgatattaagagatattaaggaaaagtaattgttgcttcctattatttttgttgttaaagttggcattctgttcttgtggctgtcttcttttaggtttgttgagggattaccttcttgctttttctagggcgtggtttccatccttgtattgttttttttttctgttattatcctttgaagcgcgggatttgtggaaagataatgtgtaaatttggttcttttgtggaatacttttgtttctccatctaaggtaattgaaagtttggctcggtacagtagcctgggttggcatttgtgttctcttagtgtctgtataacatctgtccatgctcttctggctttcatagtctctggtgaaaaatctggtgtaattctgataggcttgcctttatatgttacttgacccttttccctttttatattttccccttttaatattctatctttatttagtgcatttgttgttctgattattatgtgtcgggaggaatttcttttctggtccagtctatttggagttcagtaggcttcttgtatgttcatgggcatctctttctttaggtttgggaagttttcttctatgattttgttgaagatatttgctggccctttgatttgaaaatcttcattctcgtctactcctattatccataggcttcgttttctcattgtgtcctggatttactggatgttttgagttagaatctttttgcattttccattgtctttgattgttgtgtctttgttttctatggaatcttctgcacctgagattctctcttccatttcttgtattctgttgctgatgcttgcatctatgattccagatttctttcctagggtttctatctccagcgttgtctcactttgggttttctttattgtgtctacttcccccccccctttttttccaattccatcacctgtttggtcatgttttcctgcaattctttaagggatttttgttcttcctctttaaggtcttctacctgtttagcagtgttctcctgtatttctttgagtgagttattaaagtcctccttgatgtcctctaccatcatcatgagatatgctttaaatctgggtctagcttttcaggtgtgctggggtgccctggactgggtgaggtgggagtgctgtgttctgatgatggtgagtgttcttggttactgttagtaagtgtcttacatttacccttcgacatctggtaatctctggagttagttgatttagttgtctctggttagagattgttcctctcgtgattctgttagcctctatcagcagacctggaagactagctctctcctctgagtttcagtgttcagagtactctctgctggcaagctgtcctcttacagggaaagtgcacaggtatctggcattcggacctccctcctggccgaagatgaaggcccaaaacaggacctgtcccagaagctgtgttgctttggcctatcacagaagctgttagcttctgtagtccccactctcacctgtgcagaatactctcggcagagtcccagaaccacgatgtctgcctccgatgctcagacaaagccctcctaggccgggcagacacctatcctctggcgggaaggtgcccggatgtctggagcccaaaaaggggactgcttcagaagttctgtggctccagcctgtcccagaagctgttagcttctgtagtccacactctcacctgtgcagactactttcggcagagtcctggaactaagatgtctctcctctgataaattttattagatattttctttatttacatttcaaatgttatcctgaaagttccctaaacccttcccccaccctgctcccctacccacccactcccacttcttggccctggcgatccccctgtactggggcatataaagtttgcaagaccaaggggcctctcttcctaatgatggccgactaggccatcttctgctacatatgcagctagagacatgagctctgggggtactggttagttcatattgctgttccacctatatggttgcagaccccttcaggtccttgggtaatttctctagctcctccattggggggctctgtgttccatccaatagctgaccatgagcgtccacttctgtatttgccaggcactggcatagcctcacttgagacagctctatcaggattccttcagcaaaaccttgctggcatatgcaatagtgtctgggtttggtggttgattatggaatggatccacgggtggggcagtctctggatggtccatcctttcatcttagctccaaactttgtctctgtaaatccttccatgggtgttttgttccctattctaaggaggaatgaagtatcctcactttggtctttattcttcttgattttcttatgttttgaaaattgcatcttgggtattctaagtttctgggctaatatcctggaagaattctaattccttggggactattgttttattcatagtttgatagccaaagtgaggcatataactgtctatatagagcagcagttctcaacaattgtaacttcccctccctcctgtcctcccagtccctccctttcctctatccttccctcacccaacccttctccccttctcagaaaatgggaggcttcccatggatattaactagcctttgcatatcacatcgcagcaggactaggtacatctgagaaggatagttcttaattaaaattagccatacaaatactacttcaattacccaaactctgaacttgtgccaaaaaaggcatccacctatctattcattcaaaaatccattctttctgcgccaattctgtggcaaacactgagatcatagtgatgaattaagtaggtaagtccccagctctcctttggaaccactactaaggacatgcttaggtgtgtcaccctgagcttacaagacaaactaccttttgcagcaccaaagattgtgagtgagtccaaaatattggacagttatttatcctttgagagtttgcttcttctttgatttggctgttactaggacttggttgttctctcttgaaatatgtaacttggttttttaattgataagatcccacagttaaggaattatatatatattttaaggagaagtggaacttttttttttttcattttttttattaggtatttagctcatttacatttccaatgctataccaaaagtcccccttacccacccacccccactcccctacccacccactccccccctttggccctggcgttcccctgtaccggggcacacaaagtctgcgtgtccaatgggcctctctttccagtgatggccgactaggccatcttttgatacatatgcagctagagtcaagagctcaggggtactggttagttcataatgttgttccacctatagggttgaagttccctttagctccttgggtactttctctagctcctccattgggagccctgtgatccatccattagctgactgtgagcatccacttctgtgtttgctaggccccggcatagtctcacaagagacagctacatctgggtcctttcagtaaaatcttgctagtgtatgcaatggtgtcagcatttggaagctgattatggggtggatccctggatatggcagtctctacatggtccatcctttcatctcagctccatactttgtttctgtaactccttccatgggtgttttgttcccacttctaaggaggggcatagtgtccacacttcagtcttcatttttcttgagtttcatgtgtttaggaaattgtatcttatatcgtgggtatcctaggttttgggctagtatccacttatcagtgagtacatattgtgtgagttcctttgtgattgtgttacctcactcaggatgatgctctccaggtccatccatttggctaggaatttcataaattcattctttttaatagctgagtagtactccattgtgtagatgtaccacattttctgtatccattcctctgttgaggggcatctgggttctttccagtttctggctattataaataaggctgctatgaacatagtggagcatgtgtccttcttaccagttggggcttcttctggatatatgcccaggagaggtattgctggatcctccggtagtactatgtccaattttctgaggaaccgccagactgatttccagagtggttgtacaagcctgcaatcccaccaacaatggaggagtgttcctctttctccacatcctcgccagcatctgctgtcacctgaatttttgatcttagccattctcactggtgtgaggtggaatctcagggttgttttgatttgcatttccctgatgattaaggatgttgaacattttttcaggtgcttctctgccattcggtattcctcaggtgagaattctttgttcagttctgagccccattttttaagggggttatttgattttctgaggtccaccttcttgagttctttatatatgttggatattagtcccctatctgatttaggataggtaaagatcctttcccagtctgttggtggtctttttgtcttatagacagtgtcttttgccttgcagaaactttggagtttcattaggtcccatttgtcaattctcgatcttacagcacaagccattgctgttctgttcaggaatttttcccctgtgcccatatcttcaaggcttttccccactttctcctctataagtttcagtgtctctggttttatgtgaagttccttgatccacttagatgagaagtgggacttttaaaagacagagtcttcaaaacgttgggctgtattttatattattcttttgttttgttttgttttgtttttttaatccttaaggaagtttttaaaatttatttttatttatttatttatttttaccagtttttgtcgtcaacaatgatgagatgtggcctttctgggatccttggtatgtgcgtgttcttgcagctaccattttttggttctgggtgcacaagtaagtacattatcatgaacaaactgaattgtactcttgaaagatacccttgcttttcagtatgtcttagcaaaatacttctaggaaagattagagcattatatcagttacatgttttcagtgttgtgagcaaatgcccaattaaagctgtacaaagtttgagagttcagtccatgacagggaaggaatggccacaggagctcaaagcagttggtcacattatatctatagtcaggaagaagtgagagatgagtgcttgtgcacaagtcatttttttaatgtagtctaagacccaaggccctctgtggcacacatgcagggagttactcctctttagttaagtgtctctagaacatactaacagaaatacccagagatgtgtatcctacatgattccaaatcccatcaattgacaataaagattaaacatcttagagcctagtgtttacattctctacctttttagtcatattaacttctatggggaatcatgaattctagcttgctacatatatgtggtttgtgtgtggaggcagttatagtcttcccctaccatttgtttcttctgtatgttaattttaggcctctttctctaattccttgtcctgccacactgcagaggggtcatgggagcaaatgtcatgaaggagtagaagtaagatgcaaggcagatttggaagcattctgagaaagctgtttatttgcatagtatttatttatttatttactaattttttcagaagggtttcatatagctcaagcttactctatagctgaggtttcgtgtattggtcaagcttattatgttgctgaggctgacgtcaagctcctgatcttcctgcttttaattttctagtgctaagcatgtcttattatactgggcttctatttttcacatctagacttcttttgatctagggtcacacaagtgatataaataatggggaacacgaaaggcttatgataggatagaggaaacatgtctatcagtccaaaacatggatgttagagaagacagacagaaagctgtggcttttgaatagtaacttaagcacagttctacctctcatcctcccatatttgtaagccacgaaaaatttacaatgccagaaatatcaaattaggtatcaaaatcttcatatcaaaacagatataggaatgatagatagctgacagctcatttgatagatgattgattatggtgattgatagactaataaaaagaatggaaggaagaaatactatgcctaaaatgatgcttggatggcataaaagcaaatgaaaagctgtgctcaatatcagaacttgatagagaaatgaaaattaagacagcaatgagatacctttttaaagaagccattgcaatagcagaaagaaagaaagaaagaaagaaagaaagaaagaaagaaagaaagaaagaaagaaagaaaggaaggaaggaaggaaggaaggaaggaaagaaggaaagaaaactacaattgtttgtgatgaaaggatgcaaactacttgaaactcctgtatgttgctagtgggaatgtaaattggtatagccactttgggaaaatctgtactacatatgcaacccagccaccctcctccagctattcctcattagaagtgaaaatattacattaatggaaaagactgtatatgaatgtgtttgtaaagactatgtcaaagctagaaagaatgcaaattgtcttcaaaagatggaagggtaaacaccttgtggttctttcataacactgaataatatagagaattgcaaaggagtgaactgatgcacatggattaatagccaatgtggtctgccaaatgatagaaactatactaaagcggttatatgtgtatggttctatttacataatacttttcaataagacaaaatgtatacataaagtaaagaaacattttttcaaaggatatagaaggattgactacatagatgtgattgtatgcttactgttaggaagactagaatgttctatatcttgactgtagtgataacaactctgtgttgctaaaaatctcctcgcatggtacactaaaagggatgaattgtggggctggtggtataattcattggtagagttcttgcctcttatatgcaaggccctgtattctatacccagcattgtcaaaagaagaaaaagatataaagtatgtaaactatatgtcaataaatctgagttaaaactgtgattctttgggctgagtgaaaagaattgtttaatgtttgtagcagagaaagaagtagttttatagaatctatagtgaaaagaattgtttaatgtttgtagcagagaaagaaataattttatagaatctagatgctgcttttagttttcttacaaattagatgaaactatttattttgattccaagagctagtacctgagcacagtgaccagtcttgacaacttctgtcaaatataaaatgaaaaactaccacagactgattatcttagtgagaaatgagcacatagatgaatcagtcacccaaagtccatgcccttagaggtatacttacacctttagagaatagaatgttccttgaatttgtgtgtgtgtgagagagacagagacagagtcagagacagagagacagagacacagagagagacagagagagacagagagagagagacagagagagagatagagagacagggagagagtgagagatggggagagagagaagtgggaaatatgtgtgcaagtttatttttaattattatgcaatgatagccacataaccttttcttgccttctctaagtaatttgattctgcttgcttctgtgagttttctttagatagtagctacagagttgccttttctaagatcagacctttagatttcatctttgcacttgctgaaataagtgattgtcatttcatacagtgaagcttgaagattctcttcctaacacctaattagctagccacagtttgacagacagacagacagacagacacagacacacacccacacacccacacacccataaaagcacagaactaaatgatacattcattaccacccagtctccagtcttctctgcccttttgctctttgttctgcagcaacacactctccctccctcctcctttatcttcccttccttttagttattcctgttaaaattcacccattcttcttcttttaaatgttctagataaaatcagggccttgtacatgctaaacagattgtctgccacagaaccaactcctcaaccccaattctcccgttctttaagaccaagttccattctctttggtgaggccagattgagaattgattgtgaaacgttccttccctcccttaactgaccttcaatagtacgaatacagatgtaatgcaatctagtgcaatgcttacttacatattcgttcttttagtatgttagtgatatgaggagaagtactgggctcaagtcatcactgttcctgcctgcccggtcccctgccaccactctcaactttgaatctcatctcagggtctattgtagtgaccttgttagaacgggcaatcaaaaaaatgtttgtctaaagagaaatccagaactcaggacaacagatgaaattttgcggtctgcattagcccatgggaaattagacaggtttgaatatatgccacatggcatccaaacatgaaatattctttataagtgtttagaactttaatatataaagctcagctataattgagacttcaggactctatagatttcttcaacttccatgtcacatacaaataaaaaacaatttcagcaaacaaaaacaaatgtcttcttgaattggagaatcttgtggattcttattgtttaaagcaaacttcaaagcagaagggaactgatcagtacgtaattcaaagagttcatttgattacaggtgagacatacaattccctgtgtaaaaggcaacaacagcctgcattgtcaattataggaaaaaaacccacaaatctggaagttgaattcaaaccttatttgatttgaagcctgaattatttgctgctgagacttatataagattaggtatctctgcttaaacactaaatcaagcttaacaggaagagatattgcaaataaacaatgttcgcctaaaatgatgtcttttaatattttcattaagactgaaattcagctgggcttttttttattacagacattgatggctttataaatttttatgagacaagaccaggatacatgtacacttagtaagagacttatggatgcagtgtgacttatgaaggtatgagtaggttcctggaaaggtctgggttttaattccatctctgctactgccttggtcatatgccttcttgctggccctgacttttcatatttagacatatctaacttgagtttttaattttcttcaatgaaccaaagatacttaaattgcagtttcatggaaataatataaaaatttaaatatcgggtgtctttccttcttagatgcatacctccttagatgcattcactttcacattattccaatgagtcaattttaaagttaaacaaggaagtgtcaatcttctctgactcttcatttgcatctattataatacataaaagcatcataagcattttgacagcagaatatcctttaacatcctcatccttcctctataccttgaatctatagattaatacttgtctctgctacagatcgcagcatccagtcctgctgcagacaattcaagctgggcacacactacacctgagctgagctacaggttaaaagttcctttgatgagttaaattatgactcaaaaatatactttgtcaaagctacagagatgattcatcagttaagaacaatagattagattcgattttcagcaccagcagggcagcttttacaatctgcaatgtaagccctaagggatctgaaaccttcttctgacctccatgagtacaagcatacagacaaaaacacccataaatattttttaagtggaaatcagtgtaccagaacagtgagttattagctcaccagttgtctttctcagcacgtgttcttccattcccaaggtgcatgtgtggaccaaacacatccagttctgaagtactttgctggtaacttgactttaggagaagaaacaagctctactggcatgttcctagaccccaagaccatgcaaatccttgtgatcatgtttatcatgactgtcatgccagtggacatccttcttgctttggcacagtgtgcactgcagactgtgacatacaatgacacattctggttggctgagaagcagactgtattatgtacacaggcacaggcagtaactgctagagaaggtgattcaaggatggactaggaaggaggaaaggctttctttaagagtgtgtatcaactgacatcccacatggcatgggcggggccttcatgcaaatcctcaatatagatacaaaagtgattaactagcccactcatagccctgaacttactcttcagatccactttttttcatctaagtttccctcagtgaagatgtcaccattagaatgctgtggaccagagattctagtttcattcctgtcccattgtactgctggagagcttcaaagaggtccttccttccttccttccttccttccttccttccttccttccttccttccttccttcctccctccctccctccctccctccctctttctttttttccctccttcccttcttcccccctccctctccccatccattttttccaaactgggttcctctgtgtaatcctgctgttctggaactgactcagtagcctagtttggcctctgccacccaagtgctaggattaaatgtgtgtaccaccacagccagccaaggggttcattttttgttgaaactgtatgaatctcacagtatcaccaaaaatccacagaccagcaagcaagtctaggatttggatgactataggaatgcaagataattgaagtcccctcttattttctaaagataaggttggctgtgttagttggggttctctattccatgaagctgaatatctcagctgatcttcattatatactggaatccaaaagaggtaggctctaattaatgaggtgatggcagataggccaagaacaaaagcttcattcttccatgtccttatataggctttcagcagagggtgtgccccagattacaggaggtttttcccagttcaaatgatctggattaaagtcatatctttccccaagtatatctttctacttcaaaaattccttacaggtgtgccctccatttttaggttttatgtaaatacagatgcagtcaagttgaaaactaaaaacagccatcgtactggctttgaagtcacatagatctgtatttttcacatgttatttctcctctccatctgttcccccatccaacacttactgtacccctcaaactctcaatttcatgaatacttcttcaattcttttattagtattacatgtatgcatatatacatatacactatatacatgtatgtatatcatccttcaactctttatatgcttgaacatagactttttatttattatgcatttatttgattaaaatattttctcatataatatatctgtatcatggtttctctttcctctactcctcccagctcttccccacctcacctttcatccagatccatcccctttctgtctcttgttagaaaacaaacagacttctatgggataataaaataacttaaggtaaaaataagataaaacaaaaccaaacaactctaaataggacaaaacagaagggaaagagaccaagaaaaagcacaagaagcagatatgggcacagacatacttgtttgcacactcaggaatcccataaagggggaagccatcatatgtgtgtgtgtgtgtgtgtgtgtgtgtgtgtgtgtgtgtgtatgtatgtgtataaaataaattttcaaaaagataaaattttttttaaaaagaaaaatcctgacatgacattataagacaagggaccaccaaagatgctactgagttccttttctgttggccatctgatgctgggcatgcagactacctttaagagcagtttgtttcccctgtgagacccccttggagaaaacattttttttttattttcaagtggtaattaattgaagattgcttttgatgtattctagtcaacatctttttggtttaatttgttagtgaggccaatgtttttttctgaaacaaggtttcatgtagccaaagagtagcttctataacactttgtagccaaagagtagcttctataacactttgtagccaaagttggaccttgaactgctgatcctcctgccaccacctccaaagtgcttggattaaaaactttcaccaacatcccagtcctgtattttgcttgttgcctttaccaaaccagttggaatttattattcccagaatttgtcactctcaattcataaaacaaagttctttagagaaaacagagaaaaagtgcccatcattaaatgtattaacataatcctgagattcacaaggaaaaaaaaaacagttctacaattttgagccaaatttgaagcaagttttaataaaatactgattcccggaactcaatggagatgaccttagccaaaatggccaacagtggggagagggaacttgaagaggccacttccagtagatagacatggcatcaagtgagtgatggggttgccatcacaccttcaaaatttttgacccagaattgttcctgtcttaaaaaaatgcagagaaaaagtgaaacagagactggaggaatggctaaccagtgatctgcccaatgtgggatccatctcacaggcagggaccgaaaccctgacactattactgatgccatgttgtacttgcagacaggagcctagcatggctgtcctctgttattag

SEQ ID NO: 98 - DNA, 2337 bp, Rattus norvegicus; identical to SEQ ID NO: 6

SEQ ID NO: 99 - DNA, 1464 bp, Rattus norvegicus
ttcggcttccgaaggcctgatgtgatggcatcacagaagagaccctcacagcgacacggatccaagtacttggccacagcaagtaccatggaccatgcccggcatggcttcctcccaaggcacagagacacgggcatccttgactccatcgggcgcttctttagcggtgacaggggtgcgcccaagcggggctctggcaaggactcacacacaagaactacccactacggctccctgccccagaagtcgcagaggacccaagatgaaaacccagtagtccacttcttcaagaacattgtgacacctcgtacaccccctccatcccaaggaaaggggagaggcctgtccctcagcagatttagctggggaggaagagacagccgctctggatctcccatagcaagacgctgagagcctccctgctcagccttcccgaatcctgccctcggcttcttaatataactgccttaaacgtttaattctacttgcaccaaatagctagttagagcagaccctctcttaatcccgtggggctgtgaacgcggcgggccagcccacggcaccctgactggctaaaactgtttgtccctttttatttgaagattgagtttcctcggggtcttctctgccccgacttgctccccgtgtaccttggtcgactccggaggttcaggtgcacggacaccctttcaagttcacccctactccatcctcagactttcttttcacggcgaggcgcacccctccagcttccgtgggcactgcggatagacaggcacaccgccaaggagccagagagcatggcgcaggggactatgtggtccaggcttcctttgttttctttcccctaaagagctttgtttttcctgacaggatcagacagtcttggagtggcttacacaacgggggcttgtggtatgtgagcacaggtcgggcagctgtgagagtccagagtggggtggccctggggacgcttccaggccagcggttccctgcaccccaccagctgatttcgagcgtggcagagggaaggaaaggggcgagcgggctgggcaatggacccgacaggaaacggggacttaggggaacacgctggagatgccatgtgtggctgccgaaggtcaccatctctcctcagtgctccccagagcaggtgcttttaagaaccctgtttcctctcagagcctagggagagtccaaggacatggcgcatcaggaagtgggactgcaggagttctctggtggcctcgtgctgtccctctggccacttctcactttagggtggtcacggcagctcgccatggcagtgccattggtgcacactaacctcatggaaaagtaaccattccctgcctcttagaaagaactcattcttagttttaggagggttcctgtcgctgaatcaagtcgctgccctgatgcagggctggccttggcgaccctccagggatgaggagctcagaa

SEQ ID NO: 100 - DNA, 2405 bp, Rattus norvegicus
ctttcacagcagccaatacctgcagggcaacaaagaatcaaatgagagcgagacaagctgggaatgaagtcctggttgccagatgggagcttgaaaacacagtaagatgagtcaaaaagtggccaaggagggccccaggctctccaagaaccagaagttctcagagcacttcagcatccactgctgcccacccttcaccttcctcaactccaagcgtgagatcgtggaccgcaagtacagcatctgcaagagcggttgcttttaccagaagaaggaggaggactggatctgctgtgcctgccagaagaccagattgagaaggaggagcaggtcaaccccaagaaaaaagtgaccgagaagggacttctcgtgaatggacagcctctgcttgtggatttactgcttcaccgcaacccatctgccctcagacttatctggcctcgagtatgacgcaggggtggacacctgctgatgtaacaactacagatgccctcagtccccatggtgtgggagccttagggcagcctgcctggagcacttggacgatgccactccatcacctccctctataaccgccgaagaggcatctctgtccaccttctgaccctccatggttgttcagtctgaagattcctgtgtcttcagggatgtgcaaaacaaggtcatggtgtgcgaccatccaaatggcaaatataaaaaagaaattgtcaagtgttggcggtgacgcaagaaaaatcctagaagccacagatggggatttatacactgtcgcaacaccgttgagatgtactctggggacactatcaaggcaaagtatcttaaaacctctaatcaagcgactgtaattttaggcatccatcctggggaaaactcacacccttttagagaaaggagaaatgcccaaatttgtttaaaagatcgtggtttgtagttaagagaggtagaatgagattaaccaaaatgtcggtccacgggagagcaagagagtcaatcttggtatgtccacaaagtcctaagagcagttaaaagccaatctgtcagacagacccatgccgagcaggtaaatctagaaagcaaaccaaggactataaaagtcaagcaccaggcagtaaatccagaataagagcctatgcatacatattgacagctcacaatcctgtactggttattgcttacataaggagaagccacagatctcattctttcttctagaatgcaatagaatttaaaaatgacagcagaacaaaaggacactagaaattatcctctcagaaataaaagtataagaaataatttctggcttgaggaaataacccaggctaaaagctacacaggcctggcttaaccataccagcagggcatacctttgttaggagagggtcaattcgaagtttgtgaacagcctgggctgtttccgaggctgcataaatcttaaacaccaaaaatgtgtgttttgaattaactttgggtctggtctacagagtccggcttgtgatggctcctgacacgggagaaaaggggataagttaatataaggctctgggattttcctttgaggaacaggcaggtaggaaaggacactagaatgttggggaatgtggagggatgtaaaacagacagtattatgatggggggaactcaggaaggaacggtaaggacaccagaatggcctcgtgctgggagccagggtggccaagcccaggcagatgcacaaagaccccaaaggccaccattgcctcacaaccagacccagcaaagttcagatcaagtgcataaatgggggtcacgtcagtggaaactgtccggagcatggagcagggggtgaggaagacagtcagaaggaagcaagagatggcttagagtgttgcatggcagcaagaagaagcagtccaaatatcatcccaaggcagccatggcttcctctcccgaggacactgtggccctgtggaagtgccaaggcagaggcagaggaatttaaccgcacacaaactacatgcagaaactaaggtgctaaatgaacatctacgtgacaacctttctgaggaccaggttccagtgagcggcccagggccgttatcttcgcgatggtaactgagctgagaagaatgggaaccggataggagcacacagtagcccactggtgagacaaatccacgggcgagcctcaaccaacccactaaggaaacttcacgccttttcatctagttttcattttggcaaagcaaagccatcctgagtgcttgcttgtctccgccctccacgccacccccgagacacagagcatgcgcattaacccagagcgcgctaacacatgcacagcgttggacattagcctattaatgggaataaccagaaactactaaattttgtttgttgtagaaataaaacctggggatggatcaaaa

SEQ ID NO: 101 - DNA, 2170 bp, Rattus rattus
ccacgcaggatcacgatgctgcccagcctggcactgctcctgctggccgcctggacggttcgggctctggaggtgcccactgatggcaatgccggtctgctggcagaaccccagatcgccatgttctgtggtaaactcaacatgcacatgaatgtgcagaatggaaaatgggagtcagacccatcagggaccaaaacctgcattggcaccaaggagggaatcctgcagtactgccaagaggtctaccctgaactgcagatcacaaacgtggtggaagccaaccagccagtgaccatccagaactggtgcaagcggggccgcaagcagtgcaagacgcacacccacatcgtgattccttaccggtgcctagttggtgagtttgtaagcgatgcccttctcgtgcccgacaagtgcaagtttctacaccaggagcggatggacgtttgtgagacccatcttcactggcatactgttgccaaagagacatgcagtgagaagagcactaacttgcacgactatggcatgctgctgccctgtggcatcgacaagttccgaggggtcgagttcgtgtgctgcccgttggcggaggagagcgacagcatcgattctgcggacgcagaggaggacgactccgatgtctggtggggtggagcggacacagactatgctgatggcggtgaagacaaagtcgtagaagtagccgaagaggaggaagtggccgatgttgaggaagaagaagctgaggatgacgaggatgtggaggatggggatgaggtggaggaggaggccgaggagccctacgaagaggccacagagagaacaaccagcattgccaccactaccacaactaccactgagtctgtggaggaggtagtccgagttcccacgacggcagccagcacccctgacgcagtcgacaagtacctggagacccccggagatgagaacgagcacgcccatttccagaaagccaaagagaggttggaagccaagcaccgagagagaatgtcccaggtcatgagagaatgggaggaggcagaacgtcaagccaagaatttgcccaaagctgacaagaaggccgttatccagcatttccaggagaaagtggaatctctggaacaggaagcagccaacgagaggcagcagcttgtagagacacacatggccagagttgaagccatgctcaatgatcgccgtcgcctggccctcgagaattacatcaccgcactgcaggcggtgcctccaaggcctcatcatgtgttcaacatgctgaagaagtacgtccgtgcagagcagaaggacagacagcacaccctaaagcattttgaacatgtgcgcatggtggaccccaagaaagctgctcagatccggtcccaggttatgacacacctccgtgtgatctacgagcgcatgaaccagtctctgtccctgctctacaacgtccctgccgtggctgaggagattcaagatgaagttgacgagctgcttcagaaggagcagaactactccgacgacgtcttagccaacatgatcagtgaacccagaatcagttacggcaacgatgctctcatgccttctttgactgaaacgaagaccactgtggagctccttcccgtgaatggcgaattcagcctggatgatctccaaccgtggcatccttttggggtggactctgtgccagccaatacagaaaatgaagttgagcctgtcgacgcccgccccgctgctgaccgaggactgaccactcgaccagggtctgggttgacaaacatcaagacagaagagatctcagaagtgaagatggatgcggagttcggacatgattcaggcttcgaagtccgccatcaaaaactggtgttctttgcagaagatgtgggttcaaacaaaggtgccatcattggactcatggtgggtggcgttgtcatagcaacagtgattgtcatcaccttggtgatgctgaagaagaaacagtacacatccatccatcatggcgtggtggaggttgacgctgctgtgaccccggaggagcgccacctctccaagatgcagcagaatggatatgagaatccaacatacaagttctttgagcagatgcagaactaaaccccgccccccgccacagcagcggcctctgaacttgacagcaaaaccattgcttcactacccatcg

SEQ ID NO: 102 - DNA, 3513 bp, Rattus norvegicus; identical to SEQ ID NO: 5

SEQ ID NO: 103 - DNA, 2892 bp, Mus musculus
  misc_feature (1)..(2892): where n may be a or g or c or t/u, unknown, or other
gggaattccgaggacaaagatactcagagagaaaaagtaaaggacagaagaaggagactggagagaccaggatccttccagctgagcaaagtcagccgcaaaacagactagccaacaggctacaattggagtcagagtgccaaagacatgggcttgttagagtgttgtgctagatgtctggtaggggccccctttgcttccctggtggccactggattgtgtttctttggagtggcactgttctgtggatgtggacatgaagctctcactggtacagaaaagctaattgagacctatttctccaaaaactaccaggactatgagtatctcattaatgtgattcatgctttccagtatgtcatctatggaactgcctctttcttcttcctttatggggccctcctgctggctgagggcttctacaccaccggcgctgtcaggcagatctttggcgactacaagaccaccatctgcggcaagggcctgagcgcaacggtaacagggggccagaaggggaggggttccagaggccaacatcaagctcattctttggagcgggtgtgtcattgtttgggaaaatggctaggacatcccgacaagtttgtgggcatcacctatgccctgactgttgtatggctcctggtgtttgcctgctcggctgtacctgtgtacatttacttcaatacctggaccacctgtcagtctattgccttccctagcaagacctctgccagtataggcagtctctgcgctgatgccagaatgtatggtgttctcccatggaatgctttccctggcaaggtttgtggctccaaccttctgtccatctgcaaaacagctgagttccaaatgaccttccacctgtttattgctgcgtttgtgggtgctgcggccacactagtttccctgctcaccttcatgattgctgccacttacaacttcgccgtccttaaactcatgggccgaggcaccaagttctgagctcccatagaaactcccctttgtctaatagcaaggctctaaccacacagcctacagtgttgtgttttaactctgcctttgccactgattggccctcttcttacttgatgagtataacaagaaaggagagtcttgcagtgattaatctctctctgtggactctccctcttagtacctcttttagtcattttgctccacagcaggctcctgctagaaatgggggatgcctgagaaggtgactccccagctgcaagtcgcagaggagtgaaagctctaattgattttgcaagcatctcctgaagaccaggatgtgcttccttctcaaagggcacttccaactgaggagagcagaacggaaaggttctcaggtagagagcagaaatgtccctggtcttcttgccatcagtaggagtcaaatacattctctttgatgcacaaaaccaagaactcactcttaccttcctgtttccactgaagacagaagaaaataaaaagaatgctagcagagcaatatagcatttgcccaaatctgcctcctgcagctgggagaagggtgtcaaagcaaggatctttcgcccttagaaagagagctctgacgccagtggcaatggactatttaagccctaactcagccaaccttcttacggcaattagggagcacagtgcctgtatagacaaagcggggcggagggggggggcatcatctgtccttatagctcattaggaagagaaacagtgttgtcaggatcatctcactcccttctccttgataacagctaccatgacaaccttgtggtttccaaggagctgagaatagaaaggaactagcttatttgaaataagactgtgacctaaggagcatcagttggtggatgctaaaggtgtaatttgaaatggccttcgggtaaatgcaagatacttaactctttggatagcatgtgttcttcccccacccctatccgctagttctggcccctggcctctggcataatatcttcacaatggtgctttttttcctggggttttatccattcactcatagcaggtgattagacgatcttgattagtttcatatttcccaattgtttatctcttgtttggagttgtatcagaaagacctggaggatgattctttgagcatagttctttttgaaaacaagaaagagaaactgggcagaaagcatcacaaaaatatttgaaattgtacggtcccatgaaattattgggaattcccccaagtagtctaccatttgtagaactaggcttgataaatttgaacctcaatttgaataattggtctggtattttcttttctaataaatgacagatgattttacttgctaatattatctcagcattttgataatttaggcttaccatagaagttactgtctcttggtatatataggtcacataatagattctgccagctgttagctgttcagttcataagcttctcatagagctctggagccgcagagaggacnggcagaatttgaaacctaaagaactcccagattttcaggcttatcctgtatttgttaacaaagggtgaaagaaagaaagaaagaaagaaagaaagaaagaaagaaagaaagaaagaaagaaagaaagaaagaaagaaaaagaaaaggaaggaaggaaggaaggaagaaagaaagaaagaaagaaagaaagaaagaaagaaagaaagaaagaaagaaagagaaaaaaaaagcccctgatcgaatttcctgaggaaaagttattgtagctgtttcattgtagatttgtgctgtcattccccaaagtgctttctgctgtgttgaaagagatataagaatttacaagaagacacttgagacttgttcttgggccaatatataaggtaaacaagcaggatgcacaagagtgaggagagctaaggaattc

SEQ ID NO: 104 - DNA, 686 bp, Rattus norvegicus
gcggcctctgagcagatcgtctctccttgttcgcccagctcgctcagctccttccagcaaccatgtctgacaaacccgatatggctgagatcgagaaattcgataagtcgaagttgaagaagacagaaacacaagagaaaaatcctctgccttcaaaagaaacaattgaacaagagaagcaagctggcgaatcgtaatgaggcgagcgccgccaatatgcactgtacattccacgagcattgccttcttattttacttcttttagctgtttaacttcgtaagatgcaaagaggttggatcaagtttaaatgactgtgctgcccctttcacatcaaagaatcagaactactgaccaggaaggcctccccccgcctctcccgcccacctgctggcctggctggcagagagggaaaagaacttgcatgttggtgaaggaaaaagctgggtgggagatggtggaattgagagtaaaataaagatgtcttgcaggatataaaatgcagtttaatcagagtgccatttttttttgttcaaacgattttaattattggaatgcacaatttttttaatatgcaaataaagttttaaaacctgaaaaaaaaaaaaaaaaagaaacaacagtcgttatggccataaaacacatcatctgtgattttggagagaaccactggaaagaaagtttgagg

SEQ ID NO: 105 - DNA, 2622 bp, Rattus norvegicus
tgtatgacactacatcatgagtgacagtaaaagcgatggccagttttacagtgtgcaagtggcagactcaactttcactgttctaaaacgttaccagcagttgaaaccaattggctctggagcccaaggaattgtttgtgctgcttttgatacagttcttggaataaatgttgctgtcaagaagttaagtcgtccttttcagaaccaaacgcatgcaaagagagcctaccgtgaacttgtcctcctaaagtgtgtcaatcataaaaatataattagcttgttaaatgtgttcacaccacaaaaaacgctagaagaattccaagatgtgtacttggttatggagttaatggacgctaacttatgtcaggttattcatatggagctggaccatgaaagaatgtcatacctcctctaccagatgctttgtggcattaagcacctgcattcagctggcataattcatagggatttgaagcctagcaacattgtagtaaaatcagactgtactctcaagatccttgactttggcctggcacggacagcctgtaccaactttatgatgactccctatgtggtaactcgctactatcgggctccagaagtcatcctgggcatgggctacaaggagaatgtggacatctggtctgtcgggtgcatcatggcagaaatggtcctccataaatcctgttccccaggaagagactatattgatcaatggaataaagttattgaacagctaggaacaccatccgcagagttcatgaagaaacttcagccaactgtaaggaattatgtggaaaacagaccaaagtaccctggaatcaaatttgaagagctctttccagattggatatttccgtcagaatccgaacgagacaaaataaaaacaagtcaagccagagatctgttatcgaaaatgttagtgattgatccggacaagcggatctctgtggacgaagccttgcgccacccgtatattactgtttggtatgaccccgctgaagcagaagcgccaccacctcaaatttatgatgcccagttggaagaaagagagcatgcgattgaagagtggaaagaactaatttacaaagaagtgatggactgggaagaaagaagcaagaatggggtgaaagaccagccttcagatgcagcagtaagcagcaaggctactccttctcagtcgtcatccatcaatgacatctcatccatgtccactgagcacaccctggcctcagacacagacagcagtctcgatgcctcaaccggacccctggaaggctgccgatgaaacctcgcagatggcgcacttgtctgtgaaggactctggcttccatggccctgagcacatgggagctggtggaacaaatcaagaagctccatgttctgcatgtaagaaacacgacgccttgcccccactcagttccagtaggattgcctgcgtagactgtaacatgaggcagacgatgtctggagaaaaagtacaaaccacactgttagaaattttgttcaagatcattcaggtgagcaattagaatagccgagttcttttcaagtcgtgtggtgtccttggtgacagatcatgtgtaactgtggggactcgtatgcatgtgaccacaaatgcttgcttgaacttgcccatgtagcactttgggaatcagtatttaaatgccaaataatcttccaggtagttctgcttctagaataatctcttaatcctctttagtaatttggtgtctgtccacaaaaaaatagattatgtgtgtatgaattggccactatcatattatcatattttacccacttttatggtatgatttattctgtcttttgtatttcagaaggaatataattaaatttatttaataaataaaactacagcttttcttaaatttgtgatgttttaggctgagaattaccactgctttatatcgacactctgtgtcctttaaactgcccactatgggaaactttacgtacagctttctgcatgacaaagttccaagttgtatttcactctgcttaacgacttatgtcaccttgaatcctgaccacacatttcctttttcttggtcctctgaacttggatctagaatccctcacagaacttcaccttctttatcacaaagcaccccatctcagtagaatgaatcggcagattcctgagccccgctgcctaatgtagagctgacagggtggcttccccagaacggtgggtgggtgcatccttccctgagcccacccatcctttgctcccctctctttatttaaggtgaaaggtgattgggtctcatagcctttccttttgtagcattgcctaacttgtctttctcactgacagaagccaccacgtccagccagagcacatggtctcttaggagaccgggcttacttaccatgcatgtttgctgctgtccttttccattttgtggaggcatttcctttttctaagggaattcctcagatgttctagaaacattcagaagaacgcagaagaaatattctagagaattgggggttcattcttgaatattttctgatttaaaactgctcacctgaaattgatactttcagatcctgatcttgtaaattactcgagatttggtaagatgctgagttctctgt

SEQ ID NO: 106 - DNA, 2618 bp, Rattus norvegicus; identical to SEQ ID NO: 7

SEQ ID NO: 107 - DNA, 207 bp, Rattus norvegicus
gaatccagtctccacccggactccgccatgttgagtcttgtggggcgtgtggcctcggcctcggcctccggggccttacggggactcaaccctttggcggcgctgccacaggcgcatcttctactacgaaccgctcccgccggggtccatcctgccagagactatgcggcgcagtcgtctgcggccccgaaggcaggcaccgccacc

SEQ ID NO: 108 - DNA, 552 bp, Rattus norvegicus
  misc_feature (1)..(552): where n may be a or g or c or t/u, unknown, or other
cttcctttccgatccgccatcgttggtggagcagccgccacgatgcagatttttgtgaagacccttacagggaagaccatcacgctcgaggttgaaccctcggacactatagaaaatgtaaaggccaagatccaggataaggaaggaattcctcctgatcagcagaggttgatctttgctggtaagcagttggaagatggccgtactttgtctgactacaacattcaaaaggagtccactctccatctcgtgctgagacttcgtggtggcgctaagaaaaggaagaagaagtcttacaccaccccaaagaagaacaagcataagagaaagaaggtcaagttggctgtgctgaaatactataaggtggatgaaaatggcaaaatcagccgacttcgtcgggaatgtccttctgatgaatgtggtgctggagttttcatgggtagccactttgacaggcattactgtggcaagtgttgtctgacttactgcttcaacaaaccagaagacaagtagttgtgtatgagttaataaagagaaggaactgatgttaan

SEQ ID NO: 109 - DNA, 2099 bp, Rattus norvegicus
agatcaaagtggtgggactcgcgtcgcggccgcggagactagaaggaggactccggatccggctcggcgctcgccctcgctcgccatggagaagaccgagctgatccagaaggccaagctggccgagcaggccgagcgctacgacgacatggccacctgcatgaaagccgtgacggagcagggcgccgagctgtccaacgaggagcgcaacctgctatctgtggcctacaagaacgtggtcgggggccgcaggtccgcctggagggtcatctcgagcattgagcagaagaccgatacctcggacaagaagttgcagctgatcaaggactatcgggagaaagtggagtctgagctgaggtccatctgcaccacggtcctggaattgttggataagtatttaatagccaatgcaactaatccagagagtaaggtcttctatctgaaaatgaagggagattatttccggtatcttgctgaagtcgcttgtggtgatgatcgaaaacaaacgatagaaaattcccaaggagcctaccaagaggcatttgatataagcaagaaagagatgcaacctacacatccgatccgcctggggctggctcttaacttttctgtattttactatgagatccttaataatcccgagcttgcctgcacactggctaaaacggcttttgatgaagccatcgccgagcttgatacactgaatgaagactcctacaaagacagcaccctcatcatgcagttgcttagagacaacttaacattatggacatcagacagtgcaggagaagaatgtgatgcagctgagggggctgagaactaaaggcatccaggacaccaacctccttcccctcaagaaaacctttttacatctccattccttattccacttggatttcctctagcaaggaagcccattcatgtgtatggggtcaactgtttatagtcttttcacactgcagctttgggaaaactccatcccttggtttgtgttgtctccaccttcctggtgtgcagttactgctgtagaaaagtatcaatagcttcatttcatataaacacgagtaacttccagacacttgtgtagaggactgacagcacatttggtatttaagtaatctgaaccagttctgcaagtgactgtgttttgtattactgtgaagatatggaaatggtagtgcattacaatttaaagtgattgtaataataacgtcttgatttctacattccttttctgaactttcttgggggtttcctttcagaagcaacttttccatgctcttactacaaattcctttttagtaggaatccagaagtgttagattgaatgggaaagcgcttaatgcatccgggcttgggggtcacagattgaaatgtctcctgtgtcacattctggaggttacatctgtctgtgacaacagggcgtttccttatgcattcttcatttgctgctgtttaagttgacaacttccttcccaataaaaattcacttacacctcctgccttcgtagctctggtattcactttaccttgtgacagaagtagcatgttgctgccagaatacaagcattgctttgggcaaattaaaatgcatgtcctttcttaatacactaggaaggagaaataaagtacacaagtccaagtctaaactttagtacttttccatgcagatttgtgcacatgtgagggggtatccagtttgtccagtgattgttctttagagagttggaccactatattgtgtgtttgctaatcattgactgtagtcccaaaaaagccttgtgaaaatgttatgccctatgtaacagcagagtaacataaaataaaactacattttataaaaccatttattatggctttgtaacagttgcatacccatattttaagaacagacaaatttactactttttgaagtttgttgctatttctctttatgtaacatataatggtgatatccatatttctgcattgtggtacacttgtctagggtgcctggcactgtaaaattggactatatttctccagatagcctcatgggttgtcttcctcagatgtaatgataactggttaggtgtcatgtgtaataaagtgaacatttg

SEQ ID NO: 110 - DNA, 2187 bp, Rattus norvegicus
cggagccggaggcgagcttgtccagttccaacgccagctcgcaggcatggccccagcagcagcttcgggtggcagcaccctgcccagtggcttctccgtcttcgtcaccttccctgacttgctcttcatctttgagtttatctttggaggcctggtgtggatcctgatcgcctcctccctggtacccatgcccctggtccagggctgggtgatgtttgtgtctgtgttctgcttcctggccaccacttccctgatggtcatgtacataattggtactcatggtggggagacttcctggatcacactggatgcagcctaccactgtgtggctgccctgttttacctcagtgcctcagtcctggaagccctggccaccatcacaatgttcgatggctttacctacaggcattaccatgagaacatcgctgcagtggtgttcgcctatgtggctactctgctctacgtgatccatgctgtgttttccttaatcagatggaagtcttcataggacagcagattgggagctgaaacccagatgcaattaactggtcagcctgtcttccccattaacttcctggaacagactgaatggtggagaaaagaaaacaagccaaaagaaaacaaaacagacacaaaaacaaaaggaaaccatgttcgagtctcttgggtgttacgtttaccttctgttagggtttagggcttgctgaatttaacttccagccaaaggaggaaagagttgtcttggcgggggccctttctgcccttgaccaggacagtgggtgggagcttggaaccttgatctgaagaaatgacaatttccccttgacccttggagcaggtcctaacaattgcctttcggaattttccacaagctctttgcaccactcatcccctggcatatcttagattttgtggatagtctaggtgtcacaggcactgaaattcacccaacagaggtctctagatagatgttcatggtggaagatgaacccctttgaaatacttcattaaatacctttatgtctcatgcttcgggtggggaactgggatgttttcattctcaggaatcagggactgacacctttctactcaactttcttcctgccagagtcctttgatgtaacctgaacctcaagggacaattcagatgtgtgtgctggccagtctttcccacaatgactcactgaggatgccaccctcacaacagtgtccaccaggacagtgtctcccttgtaggtgcatcccagggagctcaaggaacaacagtttgctaaattagaatcttttcaagctcagaaaactaggtgtgggcattccttctcttcttagggctgatctaaaatgctctagtctgtgtttgggcatgttctcagatcatttctttcggggagaagagggacctgactccagagcaaagggagagacaatggctatttctggctgccacattccaggtgagggacatctgacctgaaagaagaaagtataattaggaaggacatggagagcctgcaaagtcagacatctgctaggagatctcacctggaccccacagtttaaaggattgacaaactagagttggaaccccagatgcagggacgtcctgccagccaccaggactgccaggattctagcctcggtcagcttccactagctgatgttttattctccaacaaagtgggagattgagacctacaaccaaattagatttggggagttttctaccttggttctgaggatggaacccagggggtacacatgctgggtaagcactcttctcctggatcccatcttcagccccaaattgagtcccagtggcacatccaggaggcctttggttatcccagccatactggtacccaaatctgccatttgccccacttaacacagtcccaatttcatactaaaacgcaaccacaagattagggggatttatttttttaaattaaaatataaactaagagattatatgtagttcattataatggttaacaaagtctgttactgaacgctgactggggtcgtcttatattttcaaccaaactgaaccataacattacactaaccagcagctcaacatgagcgagggttggtttttttgtttttgtttttttttttgataagaagaaaagagagatgaaggaaggaagaaaggaacaaaggaagggtgactaagatgaattttcc

SEQ ID NO: 111 - DNA, 2228 bp, Rattus norvegicus
tttagggccaaagatctcattatcacaaaagccgatgtcttaaaaaagaagcccgaccccagctcgctggtctttggagcttcgttcactgaccacatgctgatggtggagtggacctccaagtatggatgggataagcctcacaccaagccttttgaaaacttgtccatacatcccgctgcctctgttttgcactatgctgtggaactgtttgaaggcttgaaggcttttcgggaagttgataacaagatccgattgttccggccggacctcaacatgaaaagaatgtgccgatctgccgtgaggaccactctgccggagtttgacaaggaggagcttctgcaatgcgttcttcagctcatacagctcgaccgagagtgggtcccctactcaacctctgccagtctgtacatccgccccacattcatcgggattgagccatcgcttggagtcaagaagccttctaaagctctgctctttgtgattttgagccccgtgggatcttatttttctaatgggaccttttctccggtgtccctgtgggccaacccaaagttcgtcaaatcctggaaaggtgggactggagacttcaagatgggctgcaactatggatcttcccttctggcgcagtgtgaggcggcagagaatggctgtcaccaggtcctgtggctgtacggcaaggaaaaccggataactgaagtgggcacgatgaatctcttcctctactggataaacaaagatggagaagaagaactggcgacgcctccgctagatggcgtcattctcccaggagtcactcggcagagcatcctggagctgggagaagagtggggcgagtttaaggtgtgcgacagacacatcaccatggatggcctgtccaccgccctggaggagaacagagtgaaggagatgttcggctcggggacagcctgcgttgtctgcccagttgccagtattctgtacaagggccagatgctgcacattccaaccatggagaatggccacaagctttcaagtcgcatcatggcaaagttgactgatatccagtatggacggatcaagagcgaatggacactggagttgccctaatgggagagctcagggtatcggtgacggggtgccacagaagaccgactcctgtcctcgagctgggacaacctgtgactactttaactccttgtagttccattgttcattgttaccaaacgagtttgtgtccccccccccccgtgagccaagaaaattgccagtgttaagtgtcacctgtgaacatgatagtagctgctttactgtacctttccttggaaagctatcaatgaataattgcctcccctcactccataccaatccttagtaggagaatggttcccccaccaatgagatgactgtgtgctggaagggctactgaggaaatgccataggcggcctccctgtgactcatgggcaccctcagagcgggagccctttgttacttttgctggcccttgtacttgttctgttgtttacgtttttgtttgtttgttgtctaattggggaagatttgggctccctgtgaagccctgctggcctggtattccgtgatgtctgcccaggctggtctcagactcggagcgggtcttcctttctcacacagccttctggatgctggggcgatggacaggtgtgataccttgatttgtttctgtcttttaaacaaaagtttggtcggctggatttcgtttctccgcgcttctgtaagtccctgagtccgcgctaaggtggccgtgcacccttcttggtatcatggcctgcactaatgtcaccgaaggtgtctgtgaggctcactgccctttttctgtaactatacctggctgctcactgcgctgctatgagactaggggtcctgtgccttctagatctttgtatcctcaaagcccagcacatagtaagtattcagtacttgtttaccatgagaatgaacatagaagtgtactttctgtctctccatgctgaaaccctttcggaaaccacgcctgattcgggcagcatgtagcagtatttatcttaggctgtctttcttgtccctggactcctccagacagcatggaggaattctgttttaagattatcttggagtttaagtgattgccctggaaaaatgaaatgtaccaaccatgtggagatgacagctactgtacattatgtatgaaatgccaaataaagggacaagttgggagataaaaaaaaaa

SEQ ID NO: 112 - DNA, 6071 bp, Rattus norvegicus
ccctcccttccccttctcctcctctcccttggagagcccgggcaggcactgccctgcagccccagtgacaggaggagaccatactccccgacagcgccatggcccagattctgccaattcgctttcaggagcatctccagctccagaacctgggtatcaacccagcaaacattggcttcagtaccctgactatggagtcagacaaattcatctgcattagagaaaaagtgggagagcaggctcaggtggtgatcattgacatgaatgatccaagtaatccgattcgaagaccaatctcagcagacagtgccatcatgaatcctgccagcaaagtgattgcactgaaagctggaaaaactctacagatatttaacattgaaatgaaaagtaaaatgaaggcccacaccatgaccgatgatgtcaccttctggaaatggatctctctgaatacggttgctcttgttacggataatgcagtttatcactggagcatggagggggagtctcagccagtgaagatgtttgatcgtcattccagcctcgcagggtgccagatcatcaattaccgtacagatgctaagcagaagtggttgctcctgactggcatatctgcacagcaaaatcgcgtggttggagctatgcagctgtattctgtagacaggaaagtctctcagcccattgaagggcatgcggcgagttttgcacaatttaagatggaaggaaacgcagaagaatcgacgttattttgttttgctgtgcggggtcaggcaggggggaagttacatatcattgaagttggtacaccacccacaggaaaccaaccctttccaaagaaggcagtggatgtcttctttcctccagaagcacaaaatgattttcctgttgcaatgcagatcagtgaaaagcatgacgtggtgttcctgattaccaagtatggttatattcacctctatgaccttgagactggcacgtgcatctacatgaacagaatcagtggagaaaccatctttgttactgctcctcatgaagccacagctggaataataggagtcaacagaaagggacaagtcctatcagtttgtgtggaagaagagaacataattccttacatcaccaatgtcctacaaaatcctgatttggctctgagaatggctgtgcggaacaacctagctggtgcagaagagctcttcgcccggaaatttaatgctctcttcgcccagggaaactactcagaggctgcaaaggtggctgctaatgcaccgaagggaatccttcgtactccagataccatccgtcgattccagagtgtcccagctcagccaggtcaaacttcacctctgcttcagtattttggaatccttttggaccaaggccagctgaacaaatacgagtccttagagttatgtagacctgtccttcagcaagggcggaaacaacttttggagaaatggctgaaagaagataagctggaatgttctgaagaactgggtgatctcgtaaaatctgtggacccaacgttagcactgagtgtatacctcagggccaatgtccctaataaagtcatccagtgctttgcagagacaggtcaagtccagaagattgttttatatgctaaaaaagttggctatactccagactggatctttctcctgagaaatgtcatgcggatcagtccagatcaaggacagcagtttgcccaaatgttagttcaggacgaagaacctcttgctgatatcacacagattgtggatgtctttatggaatacaatctaatccaacaatgtactgccttcttacttgatgctttgaagaataatcgcccttctgaaggtcctttgcagacgcgattgcttgagatgaaccttatgcacgcacctcaagttgcagatgccattctagggaatcagatgttcacccactatgaccgggctcacatcgcccagctgtgtgagaaggcgggcctactgcagcgtgcattagaacatttcaccgacttatatgatataaaacgagcagtcgttcatacccatcttctcaaccccgagtggttagtgaattactttgggtccttatcagttgaagattccctagaatgtctcagagccatgctgtctgctaatattcgtcaaaatctacagatctgggttcaggtcgcttctaaatatcatgaacagctgtcaactcagtccctgattgaactcttcgagtcattcaagagttttgaaggcctcttttattttctggggtccattgttaacttcagtcaagacccagatgtgcactttaaatatattcaggcggcttgcaagactggacaaatcaaagaggtggaaagaatctgcagagagagcaactgctatgatccagagcgcgtcaagaatttcctcaaggaggcgaaactcacagatcagttgccactcatcatcgtctgtgaccgctttgacttcgtccatgacctggtgctgtatttatacagaaacagtcttcagaagtacatagagatatatgtccagaaagtaaatccaagtcgacttcctgtggttattggaggattgctggatgttgactgctctgaagatgtcattaaaaatttgattcttgttgtgagaggtcaattctctactgatgagcttgttgctgaagttgagaaaagaaacagattgaagctgcttcttccttggcttgaggctagaattcatgagggctgtgaggagcctgctacacacaatgcgttagccaaaatatacatcgacagcaataacaacccagagagattccttcgtgaaaacccctactatgacagtcgtgtcgtgggaaagtactgtgagaagagagacccacatctggcctgtgttgcttatgaacgtggccagtgtgatctggaactaatcaacgtttgcaatgagaattccctcttcaaaagtctttctcgctacctggtccgtcgaaaggatccagagttgtggggtagtgtgctactggaaagcaatccatacagaagaccattaattgaccaggtcgtacagacagccttgtctgaaactcaggacccagaagaagtgtcagtaactgtcaaggcttttatgacagcagatcttcctaatgaactcattgagctgctggagaaaattgtccttgataactctgtattcagtgaacacaggaatctgcaaaacctcctcatcctcactgcaattaaggctgaccgaacccgagttatggagtatattaaccgcctggacaattatgatgcgccagatattgccaacattgccatcagcaatgagctcttcgaagaagcatttgctattttccggaagtttgatgtcaatacttcagcagtgcaggtgttaattgaacatattggaaacctggatcgtgcatatgagtttgctgaacgctgcaatgagcctgctgtttggagtcaactcgcaaaagctcagttgcagaaagggatggtgaaggaagccattgattcttacatcaaagcagatgatccttcgtcttacatggaagttgttcaggccgccaatactagtggaaactgggaagaattggtgaagtatttgcagatggcacgcaagaaggcccgagagtcctacgtggagacagaattgatatttgcactggctaaaacaaaccgtcttgcagaattagaagagttcatcaatgggccaaataatgctcatattcagcaagttggtgaccgttgttatgatgagaaaatgtatgatgctgctaagttgttgtacaataatgtttctaactttggacgtttggcgtctaccctagttcaccttggcgagtatcaggcagcagttgatggtgctagaaaagctaatagtactcgaacatggaaagaggtctgctttgcctgtgtagatgggaaagagtttcgccttgctcagatgtgtggactccatattgttgtgcatgcagatgaattagaggagcttatcaactactatcaggatcgtggatattttgaagaactcatcaccatgttggaggcagccttgggactagagcgagctcacatgggaatgttcacagagctagcaattttgtattctaaattcaagccacagaaaatgagggaacacctagagttgttttggtcaagagtgaatattcctaaggtgctgagagccgcagagcaagcccatctttgggcagagctggtgtttctgtatgacaagtatgaagagtatgataatgccatcatcactatgatgaatcaccccaccgacgcatggaaggaagggcagttcaaagacatcatcaccaaggtggctaatgtggaactgtactacaaagcaatccagttctacttagaattcaagcccttgttgttaaatgacttgctcatggtgctgtctccacggttggctcatactcgtgcagtcaattatttcagcaaggttaaacagctaccactggtgaaaccatatttacgctcagttcagaaccacaacaacaagtccgtgaacgaatccctgaacaacctctttatcacagaggaggattaccaggctctgcgaacatcaatagatgcttatgacaactttgacaacatctcacttgctcaacgtttggaaaaacatgaactcattgaattcagaagaattgctgcttatctcttcaaaggaaacaatcgctggaaacagagtgtggagctgtgcaagaaagacagcctttacaaggatgcaatgcagtatgcctctgaatcgaaagacacagaattggctgaagaactcctgcagtggtttctgcaggaagagaagagagaatgctttggagcttgtctcttcacctgctacgatcttttaaggccagatgttgtcctggaaactgcatggagacataatatcatggattttgccatgccctatttcatccaggtcatgaaggagtatttgaccaaggtggataaattagatgcttcggagtcactgagaaaagaagaagaacaagctacagagacacagcccattgtttatggtcagccccagctgatgctaacagccggacccagtgtggcagtccctccccaggcaccttttggttatggttatactgcaccaccatatgggcagccacagcctggctttgggtacagcatgtgagacggaagctgatcccgtagtctcctattttcatactgaagcatcgtccacccacttctcagtttataaacgggaaacaggcaacgtgttcttgtaacctttacttcatgaaggactacctttttgttctaactatagactcggatcgcctaggttaaaactttattttcacattccgcatcattagaccttcttttcaaaggggaatagtactcacgtgggctttttctccccctcattctttgaagaactgattactattcaatctattgtgaagaacctgatttgcactctgtagtgtttaaagaaacaaagaaactctaatattgaatctcttaaatttagtgtatgtaaacagctttcactatgtattctgtaaatgcaccccattctcttttattcaaagaaaagctaacgtgaaaatactgctatgtgaccatgcaagactgtcagagccaacaaagacaacactaatcagcatatcttacattggaatcacagcgctctccaaattatttgaaaatgcatacagacaacttgcctgattttttttttttttaaaacgagtatcacaggccctgtaacctatgcaggtttccccattatgcatatagaaaatgctagtgtgttgctcacttcatgtgtaacaggtgccctcatgttgtgctgtatcctgtgctttttctgtgggaccattccattcaggaacaaagagcaccatgactgcacacgtgtgtatttactaacccttccctgaggtgtgtgtatgttggatattgtggtgttttagatcactgagtgtacagaagagagaattcaaacaagatattgctgttcttcagttttgttcgtggaatttgaaattactccaatttaaaataaattactggactgtggaaataacatgtagaattgcagttttaattaaatacatctcaaaaccag

SEQ ID NO: 113 - DNA, 1338 bp, Rattus norvegicus
ctgagctgcaccatgaaatgaaaaacgactggtctccctgatgcagcaactgggcgcggggtgggcgtttactgggggtgggggtccttcagttctatttttttattggcttatgttgtttttgtcgaaacctccatacggggcgggaaggtaagtgtgtgcgtgtgcctgtggcagggagaacggatggaagaaggtcctccagccaagcgcaaagagagccacgctgcctcctggcgcagttgccaggacagcccggcgcgagcagcaacggcagaagccgcaccgcgttccggctgagagcaagtgacgcattgcaggtacaaaccagccaatcagcagctagctcaacggcgttcgcagtgtccatctccaccgcggtgctcctccgcgccgcaaagtagcgccccccaggcgcggttcccccggccttttaacggcttgcctgggagtgaaacccacttacgtcacccgtcccctgctcccctttatctcttgcctgtctgaccggtgactgcggagaaaagggtctcccggagtggaggggggcacacggggctggccgggactcgttcgctatgttccgttatctgtcgtgaggcggagggatctggcggagggaggcggagggaggtgtttatgaggagctgggggcggaggaggagaattagtccgagtggagcgagcgagtcgagtggttgtctgttctggtctcggaaaccggtagcccttgcagcatggtgagtgcgtagccgagcggccggcggcgccggtgggggaaagatgccgaagcggactgactaaagagggggacctgcccgcgctgaccctcgaggagccgtcttccccagagggatggcaccaaaaaggccaggaggcccccgcgacggtcatgtcgcaggtgtcccccacccaggtcatcttgggttcccttagatgagtcgggggacggctgcggagcttggccgggggaagatggatcaggggtgaggggcggtgtggtcggtcgggagagcaagcgcggggcgccgcggctgaggcggcgctaaaggtcagccctggggccggattcaaaccgccgccaacggccacggctaagcgcgggcgccaggaagcgcctttgtccgcccggcagccatgcgcggggggtggggtgaggaggagcgcggggccccggggcgagcgggcgccgttagcccgcatccccgcgaggcgaggtaagccagccggcccggggcgcgccctgtgcgtcctgccggtgcgggaagcaggcgctgggggtggggtgggcgcgcggggcccggagccgccgcccgacgctgctcgctcgcgccccag

SEQ ID NO: 114 - DNA, 1964 bp, Mus musculus
gttgtgtccctcagccgcggtcgccgtagctctcgacgcggtcgtccccgccgagccgcggcgccgccgcagggagggagcggcgctgcggcccgccgcgtccgaggacgccccgtattccggggccggcacgtggctgccgctcgccgagcgcagcccgcctaggaggaaggcggcggcttgcgtccagcgggccgccggagccgggaggagaccatgtccgtgaggcgccctcagttctccacgaccgagcgcgtcatcaaagctgtcccctttcctccaacccgacggctaactttgaaggaagtttttgagaatgggaaacctaaaatggatcttttgaaaaaccatttagtaaaagaaggtcgggtggaagaggaggtggccttaaagatcatcaatgatggggctgccatcctgaagcaggagaagaccatgatagaggtggaggctccgatcacagtgtgtggtgatgttcatggacaattctttgacctgatgaagttgtttgaagttgggggatcacctagtaatactcgctacctcttcctgggtgactatgtggacagaggctatttcagtatagagtgtgtgctgtatctatggagcttaaagattaaccatcctaaaacattgtttctgcttcgaggaaatcatgaatgcaggcatcttacagagtacttcaccttcaaacaggaatgtcggatcaagtattcagagatggtgtacgatgcgtgcatgcacactttcgactgtcttcctcttgctgccctcttaaaccagcagtttctctgtgtacatggaggaatgtctcctgaaattacttgtttagaggacattaggaaattagataggttttctgagcctcctgcttttgggccagtgtgtgacctgctgtggtctgatcccttagaggactacggcagcgagaagaccctggagcactatacccacaacactgtccgaggctgctcctacttcttcagttaccctgcagtttgtgaatttttacagaacaacagtttattatcaataatcagagcccatgaagcccaggatgcggggtaccgaatgtataggaagaaccaagcaactggctttccgtcacttattacgattttctctgcccctaattacctagatgtctataacaataaagctgcagtgttgaagtatgaaaacaatgtcatgaacatcaggcagttcaactgttccccacacccctactggctcccaaacttcatggatgttttcacgtggtctttgccttttgttggagagaaagtgacagagatgctggtcaatattctcaacatatgctcggatgaagaaatgaacgtaaccgatgaagaaggagctactacaggtcgaaaagaagtcatcaagaataaaatccgagccattgggaaaatggcccgggtctttacggttcttcgggaagagagtgagaatgtgctgaccctcaagggcctcactcccacaggcacactcccactgggggtcctctctggaggaaagcagaccattgagactgccaaacaagaagccgcagaggagcgggaagccatcagaggttttacaattgcacacaggatccgaagttttgaagaagcccgaggtctagaccgaattaatgagagaatgccaccccgaaaagaggcttcatatcatcatgatgcagggaggatgcactcacactcgcatccgccacacccacaggcgtcaagaaggaccgaccatggaaagaaagccctgtaatgactcagggccctgtgcagcacagatgggtcccaaccctatgagcaaatcacatttatttatactggaaatgaaacaggaacaactcaaacaacttaaacttggaggtgcatttgtaattcagtcgcatttattctgtaagaaaaatgaccattttataaattcttctaatttatgttcaatataaaaaaaaaaaaaaaaaaaaa

SEQ ID NO: 115 - DNA, 886 bp, Mus musculus
ggggcccggcggcgtggacagcagtcccggcactcggcgccccgccgcccgcagcctcgcccagcgcttcccgagcccgccgcttcgcgcctcagccaccggccgccgccgccgccgccgccgccaccgagcggcccgagatgcaggccatcaagtgtgtggtggtgggagacggagctgttggtaaaacctgcctgctcatcagttacacgaccaatgcatttcctggagagtacatccccaccgtctttgacaactattccgccaatgttatggtagatggaaaaccagtgaatctgggcctatgggacacagctggacaagaagattatgacagattgcgtcccctctcctacccgcagacagacgtgttcttaatttgcttttcccttgtgagtcctgcatcatttgaaaatgtccgtgcaaagtggtatcctgaagtgcgacaccactgtcccaatactcctatcatcctcgtggggacgaagcttgatcttagggatgataaggacaccattgagaagctgaaggagaagaagctgacccccatcacctacccgcaggggctggccatggcgaaagagatcggtgctgtcaaatacctggagtgctcagctctcacacagcgaggactcaagacagtgtttgacgaagctatccgagcggttctctgtccccctcctgtcaagaagaggaagagaaaatgcctgctgttgtaaatgtcggagcccctcgttctcggtcctgcctggaacctttgtagctttgctcaaaaatcagcgagccttcgcatttgatgccaagtttttgttacagattaatttttccataaaaccattttgaaccaatgaaccagtcaataattttaaggttctgttttaaatgt

SEQ ID NO: 116 - DNA, 2520 bp, Mus musculus
cggcggcgggaggcgagacgaccgggagcagacgaggcgcggggccaccggagacggcggcggcggcgcggacacagccagggcgcggcggatcttccactcgcacacggagcactcggtggcccacgcaggatcacgatgctgcccagcttggcactgctcctgctggccgcctggacggttcgggctctggaggtacccactgatggcaacgccgggctgctggcagaaccccagatcgccatgttctgtggtaaactcaacatgcacatgaatgtgcagaatggaaagtgggagtcagacccgtcagggaccaaaacctgcattggcaccaaggagggcatcttgcagtactgccaagaggtctaccctgaactgcagatcacaaacgtggtggaagccaaccagccagtgaccatccagaactggtgcaagcggggccgcaagcagtgcaagacacacacccacatcgtgattccttaccgttgcctagttggtgagtttgtgagcgacgcccttctcgtgcccgacaagtgcaagttcctacaccaggagcggatggatgtttgtgagacccatcttcactggcacaccgtcgccaaagagacatgcagcgagaagagcactaacttgcacgactatggcatgctgctgccctgcggcatcgacaagttccgaggggtagagtttgtatgctgcccgttggccgaggaaagcgacagcgtggattctgcggatgcagaggaggatgactctgatgtctggtggggtggagcggacacagactacgctgatggcggtgaagacaaagtagtagaagtcgccgaagaggaggaagtggctgatgttgaggaagaggaagctgatgatgatgaggatgtggaggatggggacgaggtggaggaggaggccgaggagccctacgaagaggccaccgagagaacaaccagcactgccaccaccaccacaaccaccactgagtccgtggaggaggtggtccgagttcccacgacagcagccagcacccccgacgccgccgacaagtacctggagacacccggggacgagaacgagcatgcccatttccagaaagccaaagagaggctggaagccaagcaccgagagagaatgtcccaggtcatgagagaatgggaagaggcagagcgtcaagccaagaacttgcccaaagctgacaagaaggccgttatccagcatttccaggagaaagtggaatctctggaacaggaagcagccaatgagagacagcagcttgtagagacacacatggccagagttgaagccatgctcaatgaccgccgccgcctggccctcgagaattacatcactgcactgcaggcggtgcccccaaggcctcatcatgtgttcaacatgctgaagaagtacgtccgtgcggagcagaaagacagacagcacaccctaaagcattttgaacatgtgcgcatggtggaccccaagaaagctgctcagatccggtcccaggttatgacacacctccgtgtgatctacgagcgcatgaaccagtctctgtccctgctctacaatgtccctgcggtggctgaggagattcaagatgaagtcgatgagctgcttcagaaggagcagaactactccgacgatgtcttggccaacatgatcagtgagcccagaatcagctacggaaacgacgctctcatgccttcgctgacggaaaccaagaccaccgtggagctccttcccgtgaatggggaattcagcctggatgacctccagccgtggcacccttttggggtggactctgtgccagccaataccgaaaatgaagtcgagcctgttgacgcccgccccgctgctgaccgaggactgaccactcgaccaggttctgggctgacaaacatcaagacggaagagatctcggaagtgaagatggatgcagaattcggacatgattcaggatttgaagtccgccatcaaaaactggtgttctttgctgaagatgtgggttcgaacaaaggcgccatcatcggactcatggtgggcggcgttgtcatagcaaccgtgattgtcatcaccctggtgatgttgaagaagaaacagtacacatccatccatcatggcgtggtggaggtcgacgccgccgtgaccccagaggagcgccatctctccaagatgcagcagaacggatatgagaatccaacttacaagttctttgagcaaatgcagaactaagccccacccgcgccacagcagcggcctctgaacttggacagcgaaaccattgcttcactacccatcggtgttcatttataaaataacgtggaaagaaacaaacccggaattccatgatgtagcctgacaagaaattttgtcagtgtataaacctaggtagtattgtgcacttacactgaaggaggaattcacaatggtcaaatcagtgcacaatactacctaggtttatacactgacaaaatttcttgtcaggctacatcattattttaaatgacatttcacagcatggaattc

SEQ ID NO: 117 - DNA, 3538 bp, Homo sapiens
cagagagagaaggtaaaccaagggaacatgccagggcttcagagcaccttcctagccatggacacggaggagggggtagaggtggtgtggaacgagctccacttcggagacaggaaggccttcgcggcgcacgaggagaagatccagaccgtgttcgagcagctggtgctggtggaccacccgaacatcgtgaagttgcacaagtactggctggatacctctgaggcctgcgcgagggtcatcttcatcacagagtacgtgtcatcaggcagcctcaagcaattcctcaaaaagaccaagaagaaccacaaggccatgaacgcccgggtatggggagcgggctggggcagccacggggacaggacggggttggggcagcctcggggactgggatggtgagggggtgcccggcggcctcggacaggggctgggcgaggatgcggggcgggctccgcaggcccagccgcctctcctgcgcccacccgaccgacggagtcgtgcgtccgccgccaggcctggaagcgctggtgcacgcagatcctgtctgcgctcagcttcctgcacgcctgcagccccccaatcatccacgggaacctgaccagcgacaccatcttcattcagcacaacggcctcatcaagatcggctccgtgtggcaccgaatcttctccaatgcacttccagatgatctccgaagccccatccgcgctgagcgagaggaacttcggaacctgcacttcttccccccagagtatggagaggtggccgatgggaccgctgtggacatcttctcctttgggatgtgtgcgctggagatggctgtactggaaatccagaccaatggggacacccgggtcacagaggaggccattgctcgcgccaggcactcgctgagtgaccccaacatgcgggagttcatcctttgctgcctggcccgggaccctgcccgccggccctctgcccacagcctcctcttccaccgcgtgctcttcgaggtgcactcgctgaagctcctggcagcccactgcttcatccagcaccagtacctcatgcctgagaatgtggtggaggagaagaccaaggccatggacctgcacgcggtcttggcggagcttccccggccccgcaggcccccgctgcagtggcggtactcggaagtctccttcatggagctggacaaattcctggaggatgtcaggaatggaatctacccactgatgaactttgcagccactcgacccctggggctgccccgtgtgctggccccacccccggaggaggtccaaaaggccaagaccccgacgccagagccctttgactctgagaccagaaaggtcatccagatgcagtgcaacctggagagaagcgaggacaaggcgcgctggcatctcactctgcttctggtgctggaagaccggctgcaccggcagctgacctacgacctgctcccaacggacagcgcccaggacctcgcctcggagctcgtgcactatggcttcctccacgaggacgaccggatgaagctggccgccttcctggagagcaccttcctcaagtaccgtgggacccaggcctgacccggagccccagccccaggggaccatgccggggtgctgcccgggcaggccatgttggggagactccagcaccgtggggctgccctcctccatgcgcctgggagcacaaaggccccggtagtgaaggaaccccccgtctcctgagagtggggctgaccctgccttgggcgccgaggggttggggggtgggtgtgggggagccgttaggcctcccaggtccttaggatcagggttgcccccagaaccccttcccatatcctccattctccgccctgagttcctacccaggctgcctggctggggccactgcctcctcagcatgcaggaggctgccctgtagggaaccccagctctggggcttgggggtgagggtcagccctggacagacctctgcccagggaactgctccatggggtctgggagagcagccatcccctgctggcaccatagacccacacaaggagcctgcacagcaagccagcggtgacacacctgcaggtgtcaggcatggcactgggcacaacagggacctggcaggagaaacagaccacagagaggtctggagttgaggctgttgtcagcaaagcccctggtcccacacagctctgccctagagccacctctttgaccctttacccaccctgagaccagaacttgcagcccctctgcagatctcctctggccactgcagcccctccaatgggctttttctctcatgcattccctggcctggaggcgtcagggaccccacatcctccctgctcctcagactcacagcccctccatgttacctcccgcacctcctccctggggcagctgctccctgggcctctgaggatgtcagctcctggctccctgcctctctcccactccactcctggctcagtcttagagatttctatgccctcatggattctacccctgccttcctggcctcttgattcttggcttgcctctcctccaattccaaacttagtgaaatggccttaagcattttaaactgtatgtatacattagcgcattcatgcctttctaaacgcatttcaaatgtcaaccaggaaggcacaccactgtattagttttatactgccgctgtaaaatttaccacaaacttagtgacttaacacaaatttattgcaattctgtaggctggaagtctgactatgggtctcactggactagaatcaaggctggcaggctgccttccttcctggaggttctaggggagactctgtctcctgctccttcaggctgctggcagaatccacatcctttcggtggcagggccaaggtccccactttcttgctgactgtaaactaaggccacttccagcttgtagaggctgcctacattccttggctcttggccccctcctccatcttcagagctagcaggttcagtctgtgtcacgaaccatttctctggttccctgcagacaggaaaggttgtccctaaggactcatgagattaggttgggcccagccagataatacatgataatctccctcctcaaggtttttaatattaaacacatctgcaggacacattttgccatgtaaactaacattcactggttccagggattaaggaatgaacctcttttgttggggaagggtggcattctgctgaccacagcactccaaccaaaagccaaaaaccaaagcaagacttactaacgcatatcaaataaattaaaggtacaaaatcgtgaatctcagttatcttaaatattccaatactatttacaaaattattcaaattctcacgccttccaactcaaaattagcaatctaaagtaatttccatatcctagatggaaaccctcatgctaaactgtctgattatgcatggttctaaatggtttcagtggcaaatacataacattgtactactgattaaactgaacttaaaagcaaaaaaaaaaaaaaaaaaaaaaaaaaaaaaaaaaaaaaaaaaaaaaaa

SEQ ID NO: 118 - DNA, 259 bp, Rattus sp.
ctaaaacacccctgcacagtctccacgtacagcagatctttaaggagactgcccatgtctccacacagagctagtcatctgacccacagagagaggacatagccctgagcccccaaaacataggaaagaatgagagatgctcctctgccagcctggggaggaggagagcagacaggagtaaccactccctcccccagtaaggtgactgttatccgtcaccgtgttttaaccacacagagctggagaggtgtgtgtaacc

SEQ ID NO: 119 - DNA, 825 bp, Homo sapiens
cctctttttccggctggaaccatggagggtgtagaagagaagaagaaggaggttcctgctgtgccagaaacccttaagaaaaagcgaaggaatttcgcagagctgaagatcaagcgcctgagaaagaagtttgcccaaaagatgcttcgaaaggcaaggaggaagcttatctatgaaaaagcaaagcactatcacaaggaatataggcagatgtacagaactgaaattcgaatggcgaggatggcaagaaaagctggcaacttctatgtacctgcagaacccaaattggcgtttgtcatcagaatcagaggtatcaatggagtgagcccaaaggttcgaaaggtgttgcagcttcttcgccttcgtcaaatcttcaatggaacctttgtgaagctcaacaaggcttcgattaacatgctgaggattgtagagccatatattgcatgggggtaccccaatctgaagtcagtaaatgaactaatctacaagcgtggttatggcaaaatcaataagaagcgaattgctttgacagataacgctttgattgctcgatctcttggtaaatacggcatcatctgcatggaggatttgattcatgagatctatactgttggaaaacgcttcaaagaggcaaataacttcctgtggcccttcaaattgtcttctccacgaggtggaatgaagaaaaagaccacccattttgtagaaggtggagatgctggcaacagggaggaccagatcaacaggcttattagaagaatgaactaaggtgtctaccatgattatttttctaagctggttggttaataaacagtacctgctctc

SEQ ID NO: 120 - DNA, 1782 bp, Homo sapiens
ggcacgaggcaggatgtagagctggcagtgcctgacggcgcgtctgacgcggagttgggtggggtagagagtagggggcggtagtcgggggtggtgggagaaggaggaggcggcgaatcacttataaatggcgccgaagcaggacccgaagcctaaattccaggagggtgagcgagtgctgtgctttcatgggcctcttctttatgaagcaaagtgtgtaaaggttgccataaaggacaaacaagtgaaatacttcatacattacagtggttggaataaaaattgggatgaatgggttccggagagcagagtactcaaatacgtggacaccaatttgcagaaacagcgagaacttcaaaaagccaatcaggagcagtatgcagaggggaagatgagaggggctgccccaggaaagaagacatctggtctgcaacagaaaaatgttgaagtgaaaacgaaaaagaacaaacagaaaacacctggaaatggagatggtggcagtaccagtgagacccctcagcctcctcggaagaaaagggcccgggtagatcctactgttgaaaatgaggaaacattcatgaacagagttgaagttaaagtaaagattcctgaagagctaaaaccgtggcttgttgatgactgggacttaattaccaggcaaaaacagctcttttatcttcctgccaagaagaatgtggattccattcttgaggattatgcaaattacaagaaatctcgtggaaacacagataataaggagtatgcggttaatgaagttgtggcagggataaaagaatacttcaacgtaatgttgggtacccagctactctataaatttgagagaccacagtatgctgaaattcttgcagatcatcccgatgcacccatgtcccaggtgtatggagcgccacatctcctgagattatttgtacgaattggagcaatgttggcttatacacctctggatgagaagagccttgctttattactcaattatcttcacgatttcctaaagtacctggcaaagaattctgcaactttgttcagtgccagcgattatgaagtggctcctcctgagtaccatcggaaagctgtgtgagaggcactctcactcacttatgtttggatctccgtaaacacatttttgttcttagtctatctcttgtacaaacgatgtgctttgaagatgttagtgtataacaattgatgtttgttttctgtttgattttaaacagagaaaaaataaaagggggtaatagctccttttttcttctttcttttttttttttcatttcaaaattgctgccagtgttttcaatgatggacaacagagggatatgctgtagagtgttttattgcctagttgacaaagctgcttttgaatgctggtggttctattcctttgacactacgcacttttataatacatgttaatgctatatgacaaaatgctctgattcctagtgccaaaggttcaattcagtgtatataactgaacacactcatccatttgtgcttttgtttttttttatggtgcttaaagtaaagagcccatcctttgcaagtcatccatgttgttacttaggcattttatcttggctcaaattgttgaagaatggtggcttgtttcatggtttttgtatttgtgtctaatgcacgttttaacatgatagacgcaatgcattgtgtagctagttttctggaaaagtcaatcttttaggaattgtttttcagatcttcaataaattttttctttaaatttcaaaaaaaaaaaaaaaaaaa

SEQ ID NO: 121 - DNA, 2950 bp, Homo sapiens
tccgcttgtggccatgtaccgctacctgggcgaagcgctgttgctgtcccgggccgggcccgctgccctgggctcggcgtccgccgactcggccgcgttgctgggctgggcccggggacagcccgccgccgccccgcagccggggctggcattggccgcccggcgccactacagcgaggcggtggccgaccgcgaggacgaccccaacttcttcaagatggtggagggcttcttcgatcgcggcgccagcatcgtggaggacaagctggtggaggacctgaggacccgggagagcgaggagcagaagcggaaccgggtgcgcggcatcctgcggatcatcaagccctgcaaccatgtgctgagtctctccttccccatccggcgcgacgacggctcctgggaggtcatcgaaggctaccgggcccagcacagccagcaccgcacgccctgcaagggaggtatccgttacagcactgatgtgagtgtagatgaagtaaaagctttggcttctctgatgacatacaagtgtgcagtggttgatgtgccgtttgggggtgctaaagctggtgttaagatcaatcccaagaactatactgataatgaattggaaaagatcacaaggaggttcaccatggagctagcaaaaaagggctttattggtcctggcattgatgtgcctgctccagacatgagcacaggtgagcgggagatgtcctggatcgctgatacctatgccagcaccatagggcactatgatattaatgcacacgcctgtgttactggtaaacccatcagccaagggggaatccatggacgcatctctgctactggccgtggtgtcttccatgggattgaaaatttcatcaatgaagcttcttacatgagcattttaggaatgacaccagggtttggagataaaacatttgttgttcagggatttggtaatgtgggcctacactctatgagatatttacatcgttttggtgctaaatgtattgctgttggtgagtctgatgggagtatatggaatccagatggtattgacccaaaggaactggaagacttcaaattgcaacatgggtccattctgggcttccccaaggcaaagccctatgaaggaagcatcttggaggccgactgtgacatactgatcccagctgccagtgagaagcagttgaccaaatccaacgcacccagagtcaaagccaagatcattgctgaaggtgccaatgggccaacaactccagaagctgacaagatcttcctggagagaaacattatggttattccagatctctacttgaatgctggaggagtgacagtatcttactttgagtggctgaagaatctaaatcatgtcagctatggccgtttgaccttcaaatatgaaagggattctaactaccacttgctcatgtctgttcaagagagtttagaaagaaaatttggaaagcatggtggaactattcccattgtacccacggcagagttccaagacaggatatcgggtgcatctgagaaagacatcgtgcactctggcttggcatacacaatggagcgttctgccaggcaaattatgcgcacagccatgaagtataacctgggattggacctgagaacagctgcctatgttaatgccattgagaaagtcttcaaagtgtacaatgaagctggtgtgaccttcacatagatggatcatggctgacttcctcactatcctcttcacatgtaacttctgcagacctatcacaagtttacatgtaaccacagaaatccctttctctcctgactcattaataatggataccattctcaacaagtcaatccaagtcagcccgttaaggagaaagaaattaaggttagcggatcatgtacaagctgagtgtgaaagtagaaatcacctacaccagagagccattttggtattttgcctttaaataaaaagcctcctttatctggctgtgcagccttgctctgtggcttttcccaacacaatcagtgctagtgctggggaggaacagtcaagagcagtcagttgcttgcttattttttctggatgagtctgggacacactgtaactttaacacatttaagaagtaggtgtgtggccttttcagaaggtggcatggtcctcaagtgagttcttagtattttatatcagcaaaataattcaattttgcaggttgcaaacaaatataaaacctgtttctgtttatgaatattattcttttagaatagaataagtacatgctgctgtaataaaattgcctttaatcacttaacaagcctaaccttgactcaaacagtgaatgcctatagaaataataaatgaaaaaaactagtatttttatatcataaaacaatgtcatttatagcttatcattcatgtattgtccagcagacattaaaagccctgtggataattaagttatcttcatacctgcaaaatggtggaggctattttcattaaaactgtcagaatttgcttactataattatgatacagtccaaagaatgcagtcactttttatcatgttaactaattgttctcttttgaagatctatggttgactaattaaacaataattcaagtagagtgtcccagaaaaaaaccacttgggctccctgtttggagtctggctggctctgagcattgccaatggcccctactcacctgactttgtatcctctccttttagaggctttgcattctgcacccagcttcactaacagtgggctgaaaacatccttgggttgagtgtttcatttgggagttatttggccagggccttttgaacagtagtgtccccatgaagtgctagataatatatgtgtaagagtcagcttttttttttttttaactctaacacccttcagaaatttctaactactttgtaactgcatggcttaacctggtgataaaagcagttattaaaagtctacgttttcc

SEQ ID NO: 122 - DNA, 2950 bp, Homo sapiens; identical to SEQ ID NO: 121

SEQ ID NO: 123 - DNA, 509 bp, Homo sapiens
attctttccccaagtctctatggtagcgtcagcgtcggaggcggtagtgacggtggcgtttccttgaggaagagtgagggttccaacttttctgcttatctgggaggtgttgggcgcggacagtcgagatgtcagagaaaaagcagccggtagacttaggtctgttagaggaagacgacgagtttgaagagttccctgccgaagactgggctggcttagatgaagatgaagatgcacatgtctgggaggataattgggatgatgacaatgtagaggatgacttctctaatcagttacgagctgaactagagaaacatggttataagatggagacttcatagcatccagaagaagtgttgaagtaacctaaacttgacctgcttaatacattctagggcagagaacccaggatgggacactaaaaaaatgtgtttatttcattatctgcttggatttatttgtgtttttgtaacacaaaaaataaatgttttgatataaaaaaaaaaaaa

SEQ ID NO: 124 - DNA, 5796 bp, Homo sapiens
cgcgcgcagcccgcccgcccggcgaccagcaaggagttggcatcctttggaagagttcgtgaaagctttctgcccagagctcctggaccaatgcatcttcccaccaccttaaaccactgagcagttcagagccccagttgcagacgacttgtcctgccaccaccatgagttctgaatgtgatggtggttccaaagctgtgatgaatggcttggcacctggcagcaatgggcaagacaaagcaactgccgaccctttacgcgcacgctctatttctgctgttaaaatcattcctgtgaagacagtgaaaaacgcctcaggcctagttctccctacagacatggatcctacaaaaatctgcactgggaagggagcggtgactctccgggcctcgtcttcctacagggaaaccccaagcagtagccctgcgagccctcaggaaacccggcaacacgaaagcaaaccaggtctggagccagagccttcttcagcagatgagtggaggctttcttccagtgctgatgccaatggaaatgcccagccctcttcactcgctgccaagggctacagaagtgtgcatcccaaccttccttctgacaagtcccaggattccagtcctctactaaatgaagtttcttcttcccttattggaactgattcccaagcctttccatcagttagcaagccttcatccgcctatccctccacaacgattgtcaatcctactattgtgctcttgcaacacaatcgagaacagcaaaaacgactcagtagcctttcagatcctgtctcagaaagaagagtgggagagcaggactcagcaccaacccaggaaaaacccacctcacctggcaaggctattgaaaaaagagcaaaggatgacagtaggcgggtggtgaagagcactcaggacttaagcgatgtttccatggatgaagtgggcatcccactccggaacactgagagatcaaaagactggtacaagactatgtttaaacagatccacaaactgaacagagatgatgattcagatctgtactctcccagatactcattttctgaagacacaaaatctcccctttctgtgcctcgctcaaaaagtgagatgagctacattgatggtgagaaggtagtcaagaggtcggccacactacccctcccagcccgctcttcctcactgaagtcaagctcagaaagaaatgactgggaacccccagataagaaagtagatacaagaaaatatcgtgcagagcccaagagcatttacgaatatcagcctggcaagtcttccgttctgaccaacgaaaagatgagctcagccatcagccctactccggaaatttcttcagagactcctggatatatatattcttccaacttccatgcagtgaagagggaatcagacggggctcctggggatctcactagcttggagaatgagagacaaatttataaaagtgtcttggaaggtggtgacatccctcttcagggcctgagtgggctcaagcgaccatccagctctgcttccactaaagattcagaatcgccaagacattttataccagctgattacttggaatccacggaagaatttattcgaagacgtcatgatgataaagagaaacttttagcggaccagagacgacttaaacgcgagcaagaagaggctgatattgcagctcgacgccacacaggcgtcattccgacgcaccatcagtttatcactaatgagcgctttggggacctcctcaatatagacgatactgcaaaaaggaaatctgggtcagagatgagacctgccagagccaaatttgactttaaagctcagacactgaaggagcttcctctgcagaagggagatattgtttacatttataagcaaattgatcagaactggtatgaaggagaacaccacggccgggtgggaatcttcccacgcacctacatcgagcttcttcctcctgctgagaaggcacagcccaaaaagttgacaccagtgcaggttttggaatatggagaagctattgctaagtttaactttaatggtgatacacaagtagaaatgtccttcagaaagggtgagaggatcacactgctccggcaggtagatgagaactggtacgaagggaggatcccggggacatcccgacaaggcatcttccccatcacctacgtggatgtgatcaagcgaccactggtgaaaaaccctgtggattacatggacctgcctttctcctcctccccaagtcgcagtgccactgcaagcccacagcaacctcaagcccagcagcgaagagtcacccccgacaggagtcaaacctcacaagatttatttagctatcaagcattatatagctatataccacagaatgatgatgagttggaactccgcgatggagatatcgttgatgtcatggaaaaatgtgacgatggatggtttgttggtacttcaagaaggacaaagcagtttggtacttttccaggcaactatgtaaaacctttgtatctataagaagactgaaaaccatggagattatttttattggaggaggaagcatcattcatgaaccgatctttttagttgagtcagtaggaaaattaatacagtggataaagtaagaagcaaaagacagggacagagaagtgttgtgtttaaaacccaagcctgtctaaggttactgtgtattagacagggccgaactagtgtgctgagcaaaaagaattgaagcaaattgtatttacttagccgcttctgggagccacttcagcctttcccctcccctccacttcttgggtaatctgacctgaagcatagtccaggagcagagttagccagaaatgcctcctgctgccccagccttagagagctcccatctcaatcattgagcctgaaggcttcaagcccaagaatgcaacaagacccccagcctacatttctcagctcccctggagccagctgatcctgtaacgctgctggaggtcagtctgagctaccaagactgtccctagacaaaggtggagtcccccacactgcccaagaccaaatccctcactcaacctgctgaggtgtggatggggaaacagaggcaaaactgaggcacctgatgcattcagcctgctgtgcagcagtgccattgactgccctgatgttcagagagaaacgcacacaaggtttgcccatgagaattggggagcagacggccaagcagataggttatgtctgttttctgagtgatgaagtcaggaagccctgtggctctggaggccacttgtggttcattcttttcccatatccttggcttttagaaatggttaccttcaggacagtgcagctgcatttatcagagcactattgctaagttttcttttctggcttgtgtttttctgggacagtttagaattgggaggcctattctcatagaacaccaaaaatgatgttcagtgattcatttaacatacaccaatgtactctggctgctggggggacaaccataagcaagacatgcccagggtttgccgtggctccagatctactccctgtaggagttcaaggatcacacaaacggtagtaaccagggttgtgaatctgagtacaccctggcaaggcttctcttcagactgaagcagcaattctgccactaccagcagcaaccaggatgtctgttctttgtgggggccagatcagaagagagaggcccctgtgacgcccgggctgcttggtcacaactctgtccaattcaaggatgtttatcggcctctcttagatcctgagtgagacaaatacagaaatgacccattccctgcccaccagaaactcagaggtgattggggagactgacacaggaaaatgaacttaatcaagagagactgtgatatgtgctaagaagggtgtgagggagggagagatgaattttccctggagggatcctagaaagcattgtcatattgccatctccattagctcacttttaaacaactagggtgctggaagaacctttgtctgagggtagttcatagctggaaatacttggaatattttccagagtctctaaactctcatcttcccccacagatacacatccaagctcacaaataggagtagcaattctaggtggtagggttgtgtacggaacccctggctgtctgcatatatctcagaattaccccaggaccattgtcccaaagtctagagtctttacaggtaggcaaaatttgttttcaatgcctgtgcctcagctgctgtcacaaatacccatcttaggatcccatcagcttcccatcccccaccagacagccacagtaccctcactttctccctattgttctttcaaatcctgttctcaggaaagaaactgccactaattcattcacactaaggtgtaaatgattgataataggaatgagttacctcttcccacagacatttgtttttaagtatgacagagcagggccttaatcccaagggaaaaggttatggaactggagggggtgagctttctgggtagaaggagacttcctgaatttccttaaaacccagtaagagtaagacctgttgttttggaaggtctgctccaccatctaagagcactgtttttttttttgttgttgttgttgttgttttacggtctctgagggaatatagtaaaaatgcatatgcacgtgcaatttgcacggcagcatttcaccgattgtggactgtattggctaatgtgtttcctggtctttagatgcaaaccattaataacactatcttatctcatagttttttcaggggtgcttcttgattagtagggaattttgaacacctctttaaatacagctagaaaataaaaccaatttgtaaagccacatttgcatatgatgccagcctcacgcatttgtatatctccagaaattcaggtatgcctcaccaatttgcccgtctttaataaaatcttgtgttaaaatttgcatcacgtcgccttcctatgtatgacgaaacaagaaacagagatttccaattgctcttttgtcttcagacatttagtaatataaagtacctatttttatgctgaaatgtttatacaggtttattaatagcaagtgcaactaactggcggcatgccttgcaacacattttgatatattagccatgcttccgggtaaaggcaagccccaaactccttatcttttgcagtctctctgggatcagtaaaagaaaaaaaaaataatgtgcttaagaagtgggactgtaaatatgtatatttaactttgtatagcccatgtacctaccttgtatagaaaaataattttaaaaatttgaatggaagggggtaaaggaagtcatgaagtttttttgcatttttatttaaatgaaggaattccaaataactcacctacagatttttagcacaaaaatagccattgtaaagtgttaaaatttacgataagtattctattggggaggaaaggtaactctgatctcagttacagtttttttttcctttttaatttcattattttgggtttttggtttttgcagtcctatttatctgcagtcgtattaagtcctattgctagaataggttactacaaaaaaggttatattctgaaagaaaaataactgacattatatataaccaattaatttaaagtattgccatttaaattacacactgagagcatgtcctatgcagacatagatttttctgttcatttatttttcttcattgcagtggattgatttgataaatagatgtgttgaattactacatttgctgtacatattatttaataaactttattcagaattgcgtggc

SEQ ID NO: 125 - DNA, 1604 bp, Homo sapiens
ctaataaaaatagtttattattttgaatgatttaatggttttctacacaatttacatcacaacatgtaaattttagcagtaacatctgattctaacagcacatcatgctattcctttcatagagccttcagagattcaatgctaaacaaatttccttagttggcatcaaggcactgatcactttagaggcttttaagaaattatttaaagatgcaaatgcctctgagtgaagtgtactatcccatcactgaagcccacaggaacaagtcctacaattttaaaaaggctcgatggaaaaatttctcaatcctgaaatcccctagggaaggggtcaggagaaagtgccatggttgatatttaagaactccacagctcttaaaaataagcacttatccctaacatgcaatactgcagatgcaagttaaacttatctgttaacagctgcctgctgttttctgctcccagatgaaatgaagcaactcttctgataacgaagagatacctgtctgaggcaaacgaaacattggcacacagcacagcctcctcaatccacttgatcccaactcatctctcatttatttcggcttcttttattccaggattaatgtagtgtaacattttcatttcttttcgcttttattctgcttttgtaaaagcagtattttgagatggacattgcctcttcattgtatttctcatcaattcattatttttgtggttatagcttgacaagcaattaactttaaaatggtagattccgtaactttaaattggtagctttcatttgcttaaaattttttggcatatgcagataatgttctcatcagtagtaagaatctcagggttatgcttattccccaatggaggtatgacatataatcttttctgcctttacttatcaattcaccaaggagctgttttctctgcatctaggccatcatactgccaggctggttatgactcagaagatgttatctgaaaaaagtctatagaaaaaaaaaaggtttcccctccctcatcaacaaaagcccaccctctaagagacattcaagctgaactatcacaattcttaatcagttacaatttacaaacagataagtttaaaataaacaatttacaaaatttttgaagcataccttaacatcttgttttgcagttaaacaatggaaaagtatttctcctacactaaaaaaaaacttgcttacacacaactgaaaatagaatcttacttgataatacaaaagctaccatcagaagaaatcccttcaggatcattaagccacttcctttgctctgcagtttctatagtagttttaaattattattaaatcacctgaaaaaaattccaaaagagaaccacacactaccatatccaaacaacttttgcatttcccataattgtagttaatgtcagcccagtaggccagaccaacccccagttcaatactttccttccccaaaagctctatactttgaaggaaaacagatacagtatcaaattatgacactttccttgcccaaattaatgcactggtacacccagtggctcatatttaacttcccccagcttcccaattcaaactggggggaaaaaaactaaaaaa

SEQ ID NO: 126 - DNA, 4758 bp, Homo sapiens
cgcggagaagcttgggtacctgagccgcggtcccgggtgacaccctcagtgacgccaggcgcgttccttcctcttcctctctcctctccggccccgccttcccttccctccgcccacctccctgaagcggagccgccgtcgccaccagcgccgtcatgtcggcccccgccgggtcctctcacccggccgccagcgcccggatcccgcccaagttcggcggatcggccgtctcaggagccgcagcgcccgcgggcccgggtgcgggcccggcgccgcaccagcagaacggtccagcccagaatcaaatgcaggttccatctggatatggattgcatcatcaaaactatattgctccctcaggacattactctcaaggacctgggaaaatgacctcattgccattggatacccagtgtggtgattactactctgctctctatacagtaccaacacaaaatgtgactcctaacacagtgaaccagcaaccaggagcacagcagttgtacagcaggggtcctcctgcccctcatattgtgggatccactctaggatctttccaaggtgctgcatcgtcagcatcccatttgcatacgagtgcctcccaaccatactcctcttttgtgaatcactacaatagtccagccatgtactctgccagctcttctgttgcgtctcagggatttccctctacttgtggtcattatgctatgtcaactgtttctaatgccgcgtatcctagtgtttcatatccctctctgcctgctggtgatacatatgggcaaatgtttacctcacagaatgctccgactgttaggccagttaaagataattcattctctggtcaaaatacagctatcagccatccatcgccacttccacctctaccatcacaacagcaccaccagcagcaaagtctttcaggatacagtactctaacgtggtcatctccaggccttccatcgactcaagacaatctcatccgaaaccacacaggatccctggctgtagcgaacaacaacccaaccattactgttgcagattctttatcctgtcctgttatgcaaaatgttcagcctcccaagtccagcccagtggtatccactgttttatcaggatcctcaggatcctcatcaacaagaacacctcccactgcaaatcacccagttgagcctgtgacctcagttacacagccatcagagctattacaacaaaaaggcgtgcagtatggtgaatatgttaataaccaagctagctccgcaccaactcccttgtcatcaacttccgatgatgaggaagaggaggaggaggatgaggaagcaggtgttgacagctcttctaccacaagcagtgcttctccaatgcccaacagttatgatgccctggaaggaggcagttacccagatatgctttcttcatcagcaagcagtcctgctcctgatcccgcccctgaacctgatcctgcttctgctccagctccagcttcagctccagctcctgtcgtccctcagccttcaaaaatggctaagcctttggctatggctatccaacacttcagcctggttatcagaatgctacagcaccacttatttctggagtacagccccagtaacccggtatattctggattccagcagtatcctcaacagtatcctggtgtgaaccagctatcctccagtataggaggattgagtcttcagagttctccacaaccagaaagcctgagacctgtaaaccttactcaggagaggaatattttacctatgactcctgtttgggctcctgtacctaacttgaatgcagacctcaaaaaattaaactgtagcccagattcatttcggtgtactttgacaaatattccacagacacaggctttactgaataaagctaagcttcctttaggattgttgttacatcccttcagagacctaacgcaattaccagtgataacatcaaataccattgtgaggtgccgatcctgtcgaacgtatattaacccctttgtatccttcattgatcaacgtagatggaaatgcaatttgtgctatagagtaaacgatgttcctgaagaatttatgtataacccccttacccgatcttatggagagcctcataaacgaccagaagttcagaattcaactgtggagttcattgcttcttcagattacatgctgcgtcctcctcaacctgcagtttacttgtttgttttagatgtgtctcataatgcagtggaagctggatatttgacaattttgtgccagtcactcctagaaaatctagacaagcttcctggagattcacgaacaagaataggattcatgacctttgatagcactattcatttctacaatttacaagaaggattatcacagcctcaaatgttgattgtgtctgatatagatgatgtttttctacctacaccggatagtttacttgtgaatctatatgaaagtaaagagcttataaaagacttactgaatgcattaccaaacatgttcaccaatacaagagaaacacacagtgcccttggtcctgcacttcaggctgcctttaaattaatgtctccaacaggtggccgtgtgtctgtatttcagacacagttaccttccttgggtgcaggacttctgcaatccagagaagatcctaatcagagatcaagtacaaaggtggtacaacatcttggccctgcaactgatttttataagaaacttgcattagattgctcgggacagcaaactgcagtggatttgttccttttaagttcacagtattctgatcttgcttctctagcttgcatgtccaagtattctgcagggtgcatctattattatccatcattccactatactcacaatccttcacaagcagaaaagttacaaaaagacctaaaacggtatctcacaagaaaaattgggtttgaagctgttatgagaataaggtgtactaaaggtctttcaatgcacacttttcacggtaacttctttgtccgttctactgatttgttatcccttgccaacatcaatcctgatgctggatttgcggtgcagttgtcaattgaagaaagtttaacagatacttccttagtatgttttcaaacagccctattatatacatcaagcaaaggtgagcggagaattagagtacatacactttgtttgccagtggtaagttcactagcagatgtatatgcgggagtggatgtacaagctgccatctgccttctggcaaacatggctgtggatcggtccgtttcatcaagtctgtcagatgcaagagatgccttagtgaatgctgtagtggactcattgtctgcatatggctcaactgtctcaaatttacagcactctgcattgatggcgcccagctccctcaagttgtttcctctctatgttttggcccttctcaaacagaaagcatttagaacgggtacaagcacacggctggatgatcgtgtatatgccatgtgtcagataaagtctcagccacttgttcatctaatgaaaatgattcatcccaacttatacaggatagacagattgacagatgagggtgcagtacatgttaatgacaggattgtaccacagccacctcttcaaaaattgtctgcagagaagctgacaagagaaggtgctttccttatggactgtggctctgttttttacatttgggttgggaaaggctgtgacaataacttcatagaggatgtgcttggatatactaattttgcatcaataccacagaaaatgacacatcttccagagctagatacactttcatcagaaagagccagatccttcataacttggcttagagacagcagaccattaagtccaatccttcacatagtaaaagatgagagtcctgccaaagcagaattttttcagcatttgattgaagaccggacagaggctgcattttcttactatgaatttttgcttcatgttcagcagcagatttgtaagtgaagtagaataaaattgaataagaaaaagatctataacctaggtaaagcataatctgtcagagaagcgcgtgagaaatttgaaatgaaggcatttgttaatacaagatgcaacgcacagcactctgtctgaggctttggtaaaaagtaaaggggaagaaagaacttgacagatctttttcaactcaaattaatggtaacgatgatgctgtttcaccaagtatattttgaattggtttctacacatttccagtagtatggcagtacagtgctctgttcattgcaagctggcaaatttatgtagctatgtggaatgatatgtcataatgtaaaattagataaattcttttttcttataattaatataacatttctggacttgaactctggcaagagatgccaaaaggcattggtaccgtgttatttgtttatatgaattactttttaacaaggaatgtttcttattcattaaatgaattcaacattttctctgtaaaaacaatagagtttcagtacatgaactatagaaaaaaatctatatataatgtacataaatgttacatttgtaaagaaaatgtaaaaatgtaactatagcatatgaattgcttaaactgtgctgcattgttggatgacaactctttttgtcacagttagagaatgaggttgactaatgcatattatgaattgagtccacaaaggaacacaaaactctttgtaattctgttaaatcttttatgtagatttatttatgatcagcctactaattaaaactatttcgcttgacaaaaaaaaaaaaaaaa

SEQ ID NO: 127 - DNA, 2875 bp, Homo sapiens
ggcacgagggaacgccgagccgtcgccgcagcctccgccgccgagaagcccttgttcccgctgctgggaaggagagtctgtgccgacaagatggcggacggggagctgaacgtggacagcctcatcacccggctgctggaggtacgaggatgtcgtccaggaaagattgtgcagatgactgaagcagaagttcgaggcttatgtatcaagtctcgggagatctttctcagccagcctattcttttggaattggaagcaccgctgaaaatttgtggagatattcatggacagtatacagatttactgagattatttgaatatggaggtttcccaccagaagccaactatcttttcttaggagattatgtggacagaggaaagcagtctttggaaaccatttgtttgctattggcttataaaatcaaatatccagagaacttctttctcttaagaggaaaccatgagtgtgctagcatcaatcgcatttatggattctatgatgaatgcaaacgaagatttaatattaaattgtggaagaccttcactgattgttttaactgtctgcctatagcagccattgtggatgagaagatcttctgttgtcatggaggattgtcaccagacctgcaatctatggagcagattcggagaattatgagacctactgatgtccctgatacaggtttgctctgtgatttgctatggtctgatccagataaggatgtgcaaggctggggagaaaatgatcgtggtgtttcctttacttttggagctgatgtagtcagtaaatttctgaatcgtcatgatttagatttgatttgtcgagctcatcaggtggtggaagatggatatgaattttttgctaaacgacagttggtaaccttattttcagccccaaattactgtggcgagtttgataatgctggtggaatgatgagtgtggatgaaactttgatgtgttcatttcagatattgaaaccatctgaaaagaaagctaaataccagtatggtggactgaattctggacgtcctgtcactccacctcgaacagctaatccgccgaagaaaaggtgaagaaaggaattctgtaaagaaaccatcagatttgttaaggacatacttcataatatataagtgtgcactgtaaaaccatccagccatttgacaccctttatgatgtcacacctttaacttaaggagacgggtaaaggatcttaaatttttttctaatagaaagatgtgctacactgtattgtaataagtatactctgttatagtcaacaaagttaaatccaaattcaaaattatccattaaagttacatcttcatgtatcacaatttttaaagttgaaaagcatcccagttaaactagatgtgatagttaaaccagatgaaagcatgatgatccatctgtgtaatgtggttttagtgttgcttggttgtttaattattttgagcttgttttgtttttgtttgttttcactagaataatggcaaatacttctaatttttttccctaaacatttttaaaagtgaaatatgggaagagctttacagacattcaccaactattattttcccttgtttatctacttagatatctgtttaatcttactaagaaaactttcgcctcattacattaaaaaggaattttagagattgattgttttaaaaaaaaatacgcacattgtccaatccagtgattttaatcatacagtttgactgggcaaactttacagctgatagtgaatattttgctttatacaggaattgacactgatttggatttgtgcactctaatttttaacttattgatgctctattgtgcagtagcatttcatttaagataaggctcatatagtattacccaactagttggtaatgtgattatgtggtaccttggctttaggttttcattcgcacggaacaccttttggcatgcttaacttcctggtaacaccttcacctgcattggttttctttttcttttttctttcttttttttttttttttttttttgagttgttgtttgtttttagatccacagtacatgagaatccttttttgacaagccttggaaagctgacactgtctctttttcctccctctatacgaaggatgtatttaaatgaatgctggtcagtgggacattttgtcaactatgggtattgggtgcttaactgtctaatattgccatgtgaatgttgtatacgattgtaaggcttatgtcactaaagatttttattctgattttttcataatcaaaggtcatatgatactgtatagacaagctttgtagtgaagtatagtagcaataatttctgtacctgatcaagtttattgcagcctttcttttcctatttcttttttttaagggttagtattaacaaatggcaatgagtagaaaagttaacatgaagattttagaaggagagaacttacaggacacagatttgtgattctttgactgtgacactattggatgtgattctaaaagcttttattgagcattgtcaaatttgtaagcttcatagggatggacatcatatctataatgcccttctatatgtgctaccatagatgtgacatttttgaccttaatatcgtctttgaaaatgttaaattgagaaacctgttaacttacattttatggattggcacattgtgttacttactgcaagagatatttcattttcagcacagtgcaaaagttctttaaaatgcatatgtctttttttctaattccgttttgttttaaagcacattttaaatgtagttttctcatttagtaaaagttgtctaattgaaaaaaaaaaaaaaaaaaaaaaaaaaaaaaaaaaaaaaaaaaaaaaaaaaaaaaaaaaaaaaaaaaaaa

SEQ ID NO: 128 - DNA, 3061 bp, Homo sapiens
cctttgcccgcttggcggccggctctacgttccctgttctcgcctgcagctccgccatggctcctaaaggcagctccaaacagcagtctgaggaggacctgctcctgcaggatttcagccgcaatctctcggccaagtcctccgcgctcttcttcggaaacgcgttcatcgtgtctgccatccccatctggttatactggcgaatatggcatatggatcttattcagtctgctgttttgtatagtgtgatgaccctagtaagcacatatttggtagcctttgcatacaagaatgtgaaatttgttctcaagcacaaagtagcacagaagagggaggatgctgtttccaaagaagtgactcgaaaactttctgaagctgataatagaaagatgtctcggaaggagaaagatgaaagaatcttgtggaagaagaatgaagttgctgattatgaagctacaacattttccatcttctataacaacactctgttcctggtcgtggtcattgttgcttccttcttcatattgaagaacttcaaccccacagtgaactacatattgtccataagtgcttcatcaggactcatcgccctcctgtctactggctccaaatagaccatgtcagcttcaccccctggctttgtgtctatgggtggcctgtggtatatggaaaagtagcagggtggtcagggtgggagacacaagatgtttttatagtctagagcctttaaaaaacccagcagaatgtaattcagtatttgtttattggctgttttttgacagattgttgaaattaaatgaattgaaagggaaactcagagtactaggacgtttattaaaaggaaaaaaatgtcttgcaatgtgctgtaatcacaagaggagaaaataacttgtttccttgatctgtcagaggtcacagtaacctgggccgagctgttattatttattatataatagtagtaggaagttaataactggttctctgtgttccaagcacaatattacaacttcttttgaaccgtaaatatcagaatgaatcctcttcccaggggattgaacagaagcttaatgtttacaagtgtttgaatttgtgatctgaaataacacaaaattaaaaacatgatttctctaattttccaactagaggagagagacttgtggaaaagttctttttttctcttttttttttcttaaagaagggcagccaaggtagtaacctaaaaatagtgcccaggcatatgagagttgtcctacgaggttaaagaacacactgttccactgtatggctttggcctgagtggccagggaggtcaacttgaccctgccatgttggtttgacttactaagacacaggaatcattgttttccttgaccagggtctcacaccctggaggaatgttaagtaagagaaagaacctctttcctgaatattgacatgtaaaagaccaaagtaatttttctgaacttctgcaattctgagaactctccaaggaatttacagtgattttagtgcttgtcagcatttttccatgaggactttcatacatttgactctttagttcacaggttcccattgattgtgagcaagatatttatctctttagcccttgggatccagctgagagcaatctcttgcatttttttacccgtgtatgtacagatatcatttcttgtgtatgccatgacttgaaaaagtttgggaagctctttagcaatatcagctaaaaggatatgaaatcacaggtgatagcagttgtcattcagtaatttcctacaagcagcaccccaaaggaaatatagtcctaatctttactatccacttctaaatttaatgtgaatttcatacatgttattagttgttttctttataattttataaaaattattcatcgggagtttaacttccacttccatgctatcggatgtgttgggctccatgcaagaacttggaagaaaaacaggcaggaatgcatttgcataatgacccagatcatcattttctgcaactgagaattatatttcatcattgcttctagaagtctgcaattctttacttttctttggtgcattattatctaggtgccatcactggataatgtggagtgactagagaagtcatatatcactgtaaggtacagttagggtaacactttagaggtttattatttttaaaaaacttttcttgaactcctggccaacatggtgaaaccccgtctctactaaaaataccaaaattagccaggcgtgatggtgggtgcctgtaatctcagctacttgggaggctgaagcaggagaactgcctgaacccaggaggcagaggttgcagtgagtcgagatcgtgctactactgcctgggtggcaagggtgagactccatctcaaaaaagaaacaaaaaaacccaaaaagttttctttactgttggttaaaaaaaaaagccagaccatagtttgactggtggcatggaatttgtgtatcaaataaatgcatttgcttatttgacaaaccatcagtgtccactatttgttaccagagttgggccactatcttttaaaattgctggtgaaaacttgccactagatggagtgctgtatagatggggaaaaaattgccaccattcttggtataatacagtgtagcttagatgaggtggtgaaataggggtatcagccgaatattcctaatatagtttctcttgaattaataaactgaagatttgtaggaaaatgagtgagcaaaatttgtttactgttgtgaatttttcctacagcactgtttttaatcttggtgttttccaactttctgtactaatagatacatttctgtgcataagattataaagcatatactcacagttcagtagttttcgttaaggatttactgtgtgagtactttactgtgaggaattgcagaaccttttcccctctactcttgtctaaaagttctgtgtggcacacagagatgcgacctactcaatctgacttagtaaaaccatgctgtagaatttttgtcttaaaaagaccacatacccagcacccatgaaataaaagattcatctgtaaaaa

SEQ ID NO: 129 - DNA, 2875 bp, Homo sapiens; identical to SEQ ID NO: 127

SEQ ID NO: 130 - DNA, 7718 bp, Homo sapiens
caagaagggaccgggcgatggcagcaggggagccccgcgggcgcgcgtcctcgggagtggcgccgtgacacgcatggtttccccggacccgcggcggcgctgacttccgcgagtcggagcggcactcggcgagtccgggactgcgctggaacaatggataacttcttcaccgagggaacacgggtctggctgagagaaaatggccagcattttccaagtactgtaaattcctgtgcagaaggcatcgtcgtcttccggacagactatggtcaggtattcacttacaagcagagcacaattacccaccagaaggtgactgctatgcaccccacgaacgaggagggcgtggatgacatggcgtccttgacagagctccatggcggctccatcatgtataacttattccagcggtataagagaaatcaaatatatacctacatcggctccatcctggcctccgtgaacccctaccagcccatcgccgggctgtacgagcctgccaccatggagcagtacagccggcgccacctgggcgagctgcccccgcacatcttcgccatcgccaacgagtgctaccgctgcctgtggaagcgccacgacaaccagtgcatcctcatcagtggtgaaagtggggcaggtaaaaccgaaagcactaaattgatcctcaagtttctgtcagtcatcagtcaacagtctttggaattgtccttaaaggagaagacatcctgtgttgaacgagctattcttgaaagcagccccatcatggaagctttcggcaatgcgaagaccgtgtacaacaacaactctagtcgctttgggaagtttgttcagctgaacatctgtcagaaaggaaatattcagggcgggagaattgtagattatttattagaaaaaaaccgagtagtaaggcaaaatccctgggaaaggaattatcacatattttatgcactgctggcagggctggaacatgaagaaagagaagaattttatttatctacgccagaaaactaccactacttgaatcagtctggatgtgtagaagacaagacaatcagtgaccaggaatcctttagggaagttattacggcaatggacgtgatgcagttcagcaaggaggaagtttgggaagtgtcgaggctgcttgctggtatactgcatcttgggaacatagaatttatcactgctggtggggcacaggtttccttcaaaacagctttgggcagatctgcggagttacttgggctggacccaacacagctcacagatgctttgacccagagatcaatgttcctcaggggagaagagatcctcacgcctctcaatgttcaacaggcagtagacagcagggactccctggccatggctctgtatgcgtgctgctttgagtgggtaatcaagaagatcaacagcaggatcaaaggcaatgaggacttcaagtctattggcatcctcgacatctttggatttgaaaactttgaggttaatcactttgaacagttcaatataaactatgcaaacgagaaacttcaggagtacttcaacaagcatattttttctttagaacaactagaatatagccgggaaggattagtgtgggaagatattgactggatagacaatggagaatgcctggacttgattgagaagaaacttggcctcctagcccttatcaatgaagaaagccattttcctcaagccacagacagcaccttattggagaagctacacagtcagcatgcgaataaccacttttatgtgaagcccagagttgcagttaacaattttggagtgaagcactatgctggagaggtgcaatatgatgtccgaggtatcttggagaagaacagagatacatttcgagatgaccttctcaatttgctaagagaaagccgatttgactttatctacgatctttttgaacatgtttcaagccgcaacaaccaggataccttgaaatgtggaagcaaacatcggcggcctacagtcagctcacagttcaaggactcactgcattccttaatggcaacgctaagctcctctaatcctttctttgttcgctgtatcaagccaaacatgcagaagatgccagaccagtttgaccaggcggttgtgctgaaccagctgcggtactcagggatgctggagactgtgagaatccgcaaagctgggtatgcggtccgaagaccctttcaggacttttacaaaaggtataaagtgctgatgaggaatctggctctgcctgaggacgtccgagggaagtgcacgagcctgctgcagctctatgatgcctccaacagcgagtggcagctggggaagaccaaggtctttcttcgagaatccttggaacagaaactggagaagcggagggaagaggaagtgagccacgcggccatggtgattcgggcccatgtcttgggcttcttagcacgaaaacaatacagaaaggtcctttattgtgtggtgataatacagaagaattacagagcattccttctgaggaggagatttttgcacctgaaaaaggcagccatagttttccagaagcaactcagaggtcagattgctcggagagtttacagacaattgctggcagagaaaagggagcaagaagaaaagaagaaacaggaagaggaagaaaagaagaaacgggaggaagaagaaagagaaagagagagagagcgaagagaagccgagctccgcgcccagcaggaagaagaaacgaggaagcagcaagaactcgaagccttgcagaagagccagaaggaagctgaactgacccgtgaactggagaaacagaaggaaaataagcaggtggaagagatcctccgtctggagaaagaaatcgaggacctgcagcgcatgaaggagcagcaggagctgtcgctgaccgaggcttccctgcagaagctgcaggagcggcgggaccaggagctccgcaggctggaggaggaagcgtgcagggcggcccaggagttcctcgagtccctcaatttcgacgagatcgacgagtgtgtccggaatatcgagcggtccctgtcggtgggaagcgaattttccagcgagctggctgagagcgcatgcgaggagaagcccaacttcaacttcagccagccctacccagaggaggaggtcgatgagggcttcgaagccgacgacgacgccttcaaggactcccccaaccccagcgagcacggccactcagaccagcgaacaagtggcatccggaccagcgatgactcttcagaggaggacccatacatgaacgacacggtggtgcccaccagccccagtgcggacagcacggtgctgctcgccccatcagtgcaggactccgggagcctacacaactcctccagcggcgagtccacctactgcatgccccagaacgctggggacttgccctccccagacggcgactacgactacgaccaggatgactatgaggacggtgccatcacttccggcagcagcgtgaccttctccaactcctacggcagccagtggtcccccgactaccgctgctctgtggggacctacaacagctcgggtgcctaccggttcagctctgagggggcgcagtcctcgtttgaagatagtgaagaggactttgattccaggtttgatacagatgatgagctttcataccggcgtgactctgtgtacagctgtgtcactctgccgtatttccacagctttctgtacatgaaaggtggcctgatgaactcttggaaacgccgctggtgcgtcctcaaggatgaaaccttcttgtggttccgctccaagcaggaggccctcaagcaaggctggctccacaaaaaaggggggggctcctccacgctgtccaggagaaattggaagaagcgctggtttgtcctccgccagtccaagctgatgtactttgaaaacgacagcgaggagaagctcaagggcaccgtagaagtgcgaacggcaaaagagatcatagataacaccaccaaggagaatgggatcgacatcattatggccgataggactttccacctgattgcagagtccccagaagatgccagccagtggttcagcgtgctgagtcaggtccacgcgtccacggaccaggagatccaggagatgcatgatgagcaggcaaacccacagaatgctgtgggcaccttggatgtggggctgattgattctgtgtgtgcctctgacagccctgatagacccaactcgtttgtgatcatcacggccaaccgggtgctgcactgcaacgccgacacgccggaggagatgcaccactggataaccctgctgcagaggtccaaaggggacaccagagtggagggccaggaattcatcgtgagaggatggttgcacaaagaggtgaagaacagtccaaagatgtcttcactgaaactgaagaaacggtggtttgtactcacccacaattccctggattactacaagagttcagagaagaacgcgctcaaactggggaccctggtcctcaacagcctctgctctgtcgtccccccagatgagaagatattcaaagagacaggctactggaacgtcaccgtgtacgggcgcaagcactgttaccggctctacaccaagctgctcaacgaggccacccggtggtccagtgccattcaaaacgtgactgacaccaaggccccgatcgacacccccacccagcagctgattcaagatatcaaggagaactgcctgaactcggatgtggtggaacagatttacaagcggaacccgatccttcgatacacccatcaccccttgcactccccgctcctgccccttccgtatggggacataaatctcaacttgctcaaagacaaaggctataccacccttcaggatgaggccatcaagatattcaattccctgcagcaactggagtccatgtctgacccaattccaataatccagggcatcctacagacagggcatgacctgcgacctctgcgggacgagctgtactgccagcttatcaaacagaccaacaaagtgccccaccccggcagtgtgggcaacctgtacagctggcagatcctgacatgcctgagctgcaccttcctgccgagtcgagggattctcaagtatctcaagttccatctgaaaaggatacgggaacagtttccaggaaccgagatggaaaaatacgctctcttcacttacgaatctcttaagaaaaccaaatgccgagagtttgtgccttcccgagatgaaatagaagctctgatccacaggcaggaaatgacatccacggtctattgccatggcggcggctcctgcaagatcaccatcaactcccacaccaccgctggggaggtggtggagaagctgatccgaggcctggccatggaggacagcaggaacatgtttgctttgtttgaatacaacggccacgtcgacaaagccattgaaagtcgaaccgtcgtagctgatgtcttagccaagtttgaaaagctggctgccacatccgaggttggggacctgccatggaaattctacttcaaactttactgcttcctggacacagacaacgtgccaaaagacagtgtggagtttgcatttatgtttgaacaggcccacgaagcggttatccatggccaccatccagccccggaagaaaacctccaggttcttgctgccctgcgactccagtatctgcagggggattatactctgcacgctgccatcccacctctcgaagaggtttattccctgcagagactcaaggcccgcatcagccagtcaaccaaaaccttcaccccttgtgaacggctggagaagaggcggacgagcttcctagaggggaccctgaggcggagcttccggacaggatccgtggtccggcagaaggtcgaggaggagcagatgctggacatgtggattaaggaagaagtctcctctgctcgagccagtatcattgacaagtggaggaaatttcagggaatgaaccaggaacaggccatggccaagtacatggccttgatcaaggagtggcctggctatggctcgacgctgtttgatgtggagtgcaaggaaggtggcttccctcaggaactctggttgggtgtcagcgcggacgccgtctccgtctacaagcgtggagagggaagaccactggaagtcttccagtatgaacacatcctctcttttggggcacccctggcgaatacgtataagatcgtggtcgatgagagggagctgctctttgaaaccagtgaggtggtggatgtggccaagctcatgaaagcctacatcagcatgatcgtgaagaagcgctacagcacgacacgctccgccagcagccagggcagctccaggtgaaggcgggacagagcccacctgtctttgctacctgaacgcaccaccctctggcctaggctggctccagtgtgccatgcccagccaaaacaaacacagagctgcccaggctttctggaagcttctggtctgagggaggtgtctccgaggatccttttgcctgccgccttcattgatcctgtattaagctgtcaactttaacagtctgcacagtttccaaagctttactactcttagaggacacatgccttaaaaaaggaggggaggaaccacgctgccaccaaagcagccggaagtgccttaacttgtggaaccaacactaatcgaccgtaactgtgctactgaagggaactgcctttcccccttctgggggagacttaacagagcgtggaaggggggcattctctgtcaatgatgcactaacctcccaacctgatttccccgaatctgagggaaggtgagggagtgggaagggggatggagagctcgaggggacagtgtgtttgagctggagtgctgcgggcagcctttctcatggaatgacatgaatcaacttttttctttgtttcatcttttaagtgtacgtgcttgcctgttcgtgcatgtgttcataaactcaacaccttaatcatggtttcatgagcattaaaaagcaaagggaaaaaggatgtgtaatggtgtacacagtctgtatattttaataatgcagagctatagtctcaattgttactttataaggtggttttattaacaaacccaaatcctggattttcctgtctttgctgtattttgaaaaacacgtgttgactccattgttttacatgtagcaaagtctgccatctgtgtctgctgtattataaacagataagcagcctacaagataactgtatttataaaccactcttcaacagctggctccagtgctggttttagaacaagaatgaagtcattttggagtctttcatgtctaaaagatttaagttaaaaacaaagtgttacttggaaggttagcttctatcattctggatagattacagatataataaccatgttgactatgggggagagacgctgcattccagaaacgtcttaacacttgagtgaatcttcaaaggaccctgacattaaatgctgaggctttaatacacacatattttatcccaagtttataatggtggtctgaacaaggcacctgtaaataaatcagcatttatgaccagaagaaaaataatctggtcttggactttttatttttatatggaaaagttttaaggacttgggccaactaagtctacccacacgaaaaaagaaatttgccttgtccctttgtgtacaaccatgcaaaactgtttgttggctcacagaagttctgacaataaaagatactagct

SEQ ID NO: 131 - DNA, 1371 bp, Homo sapiens
ttcaggaaaaatctgtaatggggggcgggcccggagggctgtcggtgggcccgtctgcgtacgacggcccgtcccctgcgcacggacgcctggaagaagggggtggggccacgtttgcgtccgcgccagcaggcccgagatagcggcgaggtccgctttcagtgtatggttttccctgccaaacggttctgcttggtgccatccatggagggcgtgcgctgggccttttcctgcggcacttggctgccgagccgagccgaatggctgctggcagtgcgatcgattcagcccgaggagaaggagcgcattggccagttcgtctttgcccgggacgctaaggcagccatggctggtcgtctgatgataaggaaattagttgcagagaaattgaatatcccttggaatcatattcgtttgcaaagaactgcaaaaggaaaaccagttcttgcaaaggactcatcgaatccttacccgaatttcaactttaacatctctcatcaaggagactatgcagtgcttgctgctgaacctgagctgcaagttggaattgatataatgaagactagttttttccaggtcgtggttcaatttccagaattctttcatattatgaaaagaaagtttaccaacaaagaatgggaaacaatcagaagctttaaggatgagtggactcagctggatatgttttataggaattgggcacttaaggaaagcttcataaaagccattggtgttggactaggatttgaattgcagcggcttgaatttgatctatctccattaaacttggatataggccaagtttataaagaaacacgtttattcctggatggagaggaagaaaaagaatgggcatttgaggaaagcaaaatagatgagcaccattttgttgcagttgctcttaggaaacccgatggatctagacatcaggatgttccatctcaggatgattccaaaccaacccagaggcaatttactattctcaactttaatgatttaatgtcatctgccgttcccatgacacctgaagatccttcattttgggactgtttttgcttcacagaagaaattccaatacgaaatgggtacaaagtcatgatgattccctgagtaacaaagggaaatgaaaactgtttgtgatcttccgtattcactgaaaaataaatgcttgtttagtatcaaattttatttcacgaaagtttttttaaagaacagaaacttttccaattaaaaaaaaaaagcagacttctggttcaagatagctcactggaatacatgtttacctctttctttcctaaattgcattgaattgataggaaggatggcggaatcttaaagtgatacatgctaactgtaaaaaaaaaaaaaaaa

SEQ ID NO: 132 - DNA, 2383 bp, Homo sapiens
aaaaaaaaaaaaaaaaaaaacaccagtttttccaacatctaattgagcttttgattaattccgtgtaccagattctactgaagaaaggtagccatggaagagaatatggaagagggacagacacaaaaagggtgttttgaatgctgtatcaaatgcctggggggcattccctatgcctctctgattgccaccatcctgctctatgcgggtgttgccctgttctgtggctgcggtcatgaagcgctttctggaactgtcaacattctgcaaacctactttgagatggcaagaactgctggagacacactggatgtttttaccatgattgacatctttaagtatgtgatctacggcatcgcagctgcgttctttgtgtatggcattttgctgatggtggaaggtttcttcacaactggggccatcaaagatctctatggggatttcaaaatcaccacttgtggcagatgtgtgagcgcttggttcattatgctgacatatcttttcatgttggcctggctgggagtcacggctttcacctcactgccagtttacatgtacttcaatctgtggaccatctgccggaacaccacattagtggagggagcaaatctctgcttggaccttcgtcagtttggaattgtgacaattggagaggaaaagaaaatttgtactgtctctgagaatttcttgaggatgtgcgaatctactgagctgaacatgaccttccacttgtttattgtggcacttgctggagctggggcagcagtcattgctatggttcactaccttatggttctgtctgccaactgggcctatgtgaaagacgcctgccggatgcagaagtatgaagacatcaagtcgaaggaagagcaagagcttcatgacatccactctactcgctccaaagagcggctcaatgcatacacataaatgcatcttcctgttctttctaccatttgaatgcattggtgtttaactaagggccatccaaccatccaacctttaaaaaacaaaacgaaagtgcttctcatcaatgatatgtaaggtgacttatgaatcacctgagtacaattctttgttgtttagcacttaaatttcccaatttattaaattgatgtaaatcagatcttttctacaagctcctatccagccttttttttgaaatttctcaaactcatttactagttctgtaaaatcaaagatactaacattgtcaaatgcaaagatttgtttgatttttaaccacttcccatgtgttatacataacaccttttgcattatgtcttatgttttgaaaagaaaatagccttttatactttttagttttgatttcggtaactagtttaactacaggtaaccttcaaaggaccattgtacattatgaacaatagatagagattacatcttgatgactcttgaaatatggaaattttgtctgaagatcagtggccatattactgtaggccctggttcatgttttcatcaatctaaggtgcaatttctaaatttgtaagagtaggtttaaaaaaaaaagtgcttcttatctttgttaacattgtacttttccttgatgttcttaaaaggtatttccctcagattactcatgtttatgttgtgagcatgtagaaacagtaatgctaatgcatggctagttgcctttttaagattgtgacaccaggcttaccttttaaagtttagtatatagagacaattttaatggaaataactactgtagactattgaagaatgatctctttgtgatttaagaagtggctggattggaacttttaatatgctaatgtggaaaattaattacctttatgaaggtggtttattacaaataagcacactaacccctcggaagttgttttacctactttaaaagttttaatggattgcacctctgtaaactattcctaaaatgtgtatgatatatttgaaaaggcttccattaatataatagctttgcttgcagccttccaatctatgttggtttacctgtagtgttttataaagtgtggtcagagggccctatagaatgtattgtttgaaagtgtagtgatatatttgtgtttttatttcaagtaagtcattttaaccgaatgttcattcatattcatttataaaaagtacctgtatcaaaggaattttaacaaagagcaatcagtattattggaccaaatttggtgtttgttttcaccttgacgctcttcttttcattatttctaatgctacaagaatgctgtaaagtgtcttctaaaatgatgtagcctgacaagacatttttttcagtgtataaaactaggtagtattgtgcactgatttgaccattgtgaaatcctttctcagtgtaactgcatttctaataaaaatttattgagtg

SEQ ID NO: 133 - DNA, 564 bp, Homo sapiens
  misc_feature (1)..(564): where n may be a or g or c or t/u, unknown, or other
agcttaaaatgttttattaagtatatataatattacagggtaatatttacaaagttatgtttttttttaaataaaaaagtaccttggcaaagattgcagatattcaaagctttaaacagtgataaattgatttaatacatataanaaaaaaaacctttaacggtaacacagctgtaaaacaactttggtcttcaaatcactgcaaaaaaatggctactgacaaatagcacacctttaattgctatgcaaaaaagctccaagagaggatcttgcacatagcaacactggagttctctttatttagaatggttaatagatatttatacgatgtgggatctaattctcaacaatggctttttgtaaataatgctccatttantaaaaacaaaatgttttcttctctcaccagtcatgataacaacacttttaagatttaagatgttgtcttacagaggagcntagtacaaatgctttcnttttttccaaaagggaaatttatggagaaagcnggtcctcaatgatcctaattaagaactgtccaagcnaaaggcagaaaacngcctt

SEQ ID NO: 134 - DNA, 2130 bp, Homo sapiens
tgaaccgaggcaagggggcgcggcgcacgcagtatggcgcccaacatctacttggttcgccagcggatcagtcgactcggccagaggatgtccggcttccagatcaacctcaacccgctcaaggagccactcggcttcatcaaggtcctcgagtggattgcttctatctttgcttttgccacctgtggaggttttaagggccaaacagaaattcaagtgaattgtcctcctgcagttactgagaataaaactgttacagctacttttggttatccattcaggttgaatgaggcatcatttcagccacctccaggtgtaaacatatgtgatgtaaattggaaagattacgtcctcataggcgattactcttcttctgcacaattctatgttacctttgcagtctttgtgttcctgtactgcattgctgcccttctgctttatgttggctacacgagtctgtatctggatagtcgtaaacttcctatgatagactttgttgttacacttgttgccacttttttgtggttggtgagcacttcagcctgggctaaagctctgacagatattaaaatagctactggtcacaatattattgatgaacttccgccttgtaagaagaaagcagtactgtgttactttggctctgtgaccagtatgggatccctaaatgtatctgtgatatttggctttctaaatatgatactctggggaggaaatgcttggtttgtgtacaaggagaccagcctacacagtccatcaaatacatctgcccctcatagccaaggaggtattccacctcctaccggaatataattaaagggagaaatacactgtatgaagtatatgttgatactatgacatgttgccaacaccttgagaagcattatttgtttctaataaaagtaatggctttgtcaatatattggtgggtttaaaactttgctgcttttttacataaagcctgtgcctttcctagaaagttaagatgtaaatgtattctcacatgtaaatttgaaagttcaggggtctattatgaaatggattacacattttaaatgaacccataatttttttcactaaagctgtttgccctccaaagtgtttacacctaagcctaacatgtatcgctcattcagaaaactgttatattgtcataccatagtaggaagaaaaacctttatttggaatatacactactgtaagtttgtacagatcatatacctaccacctgtctttgcttaaagagccttgattacataaatatgtaggaaaaaacatattgagttcaaaatttatatctaacattgtttatgttatgattttttttaattgcaaagactaggtgtatatttttttctgtttttctaaatgacccgtggtacttaataggtgtactaaaattgtgttgggagcagggatttggaaatttctgagagatgtgtagttaattagtaattctgtttcatgagatatgatctgttatgctagtggtttaataggcttgctatgtaagtagaacgtggctcaactagatatcttatatgtatgggcattacctcttagtgatatttgtttcctgtcctttgttgctcatgctgtttaagtgcaggctgagacccagcctctttgtaagtacagtaaaataatccaccgttttttacagaccctagtcaaagggttaaaaaaattaagattgctttccatgtttgaaatttaccattgagagtcaatgaagttgctattttgagtttagcattgatattgtgaaaataagtgcaatttggatttcatgtttcttaatattcattcttgtttcacaaatgaatgattaaggaattatgcatcataaaggaacctaagtgaggtatatgatgagtgtattgtctttgcacacacatataggtatattctgaatacaagcttattcattttgcttcctaatctttttgttgtacagggattcaggtttcttattcttacaacatgattgtttatatgtgaagcacatcttgctgttgccttatttttgatgcttttattcatgacaagaattgtcaatataagaatgtatatctttgccgcaaccaatttaataaaggagttgaaagaaaaaaaaaaaaaaaaaaaaaa

SEQ ID NO: 135 - DNA, 2046 bp, Homo sapiens
aattcggcacgagctcacgttgcattgaagacgaaacctcggggaggtcaggcgctgtctttccttccctccctgctcggcggctccaccacagttgcaacctgcagaggcccggagaacacaaccctcccgagaagcccaggtccagagccaaacccgtcactgaccccccagcccaggcgcccagccactccccaccgctaccatggccgaagacgcagacatgcgcaatgagctggaggagatgcagcgaagggctgaccagttggctgatgagtcgctggaaagcacccgtcgtatgctgcaactggttgaagagagtaaagatgctggtatcaggactttggttatgttggatgaacaaggagaacaactggaacgcattgaggaagggatggaccaaatcaataaggacatgaaagaagcagaaaagaatttgacggacctaggaaaattctgcgggctttgtgtgtgtccctgtaacaagcttaaatcaagtgatgcttacaaaaaagcctggggcaataatcaggacggagtggtggccagccagcctgctcgtgtagtggacgaacgggagcagatggccatcagtggcggcttcatccgcagggtaacaaatgatgcccgagaaaatgaaatggatgaaaacctagagcaggtgagcggcatcatcgggaacctccgtcacatggccctggatatgggcaatgagatcgatacacagaatcgccagatcgacaggatcatggagaaggctgattccaacaaaaccagaattgatgaggccaaccaacgtgcaacaaagatgctgggaagtggttaagtgtgcccacccgtgttctcctccaaatgctgtcgggcaagatagctccttcatgcttttctcatggtattatctagtaggtctgcacacataacacacatcagtccacccccattgtgaatgttgtcctgtgtcatctgtcagcttcccaacaatactttgtgtcttttgttctctcttggtctctttctttccaaaggttgtacatagtggtcatttggtggctctaactccttgatgtcttgagtttcatttttcattttctctcctcggtggcatttgctgaataacaacaatttaggaatgctcaatgtgctgttgattctttcaatccacagtattgttcttgtaaaactgtgacattccacagagttactgccacggtcctttgagtgtcaggctctgaatctctcaaaatgtgccgtctttggttcctcatggctgttatctgtctttatgatttcatgattagacaatgtggaattacataacaggcattgcactaaaagtgatgtgatttatgcatttatgcatgagaactaaatagatttttagattcctacttaaacaaaaactttccatgacagtagcatactgatgagacaacacacacacacacaaaacaacagcaacaacaacagaacaacaacaaagcatgctcagtattgagacactgtcaagattaagttataccagcaaaagtgcagtagtgtcacttttttcctgtcaatatatagagacttctaaatcataatcatccttttttaaaaaaaagaattttaaaaaagatggatttgacacactcaccatttaatcatttccagcaaaatatatgtttggctgaaattatgtcaaatggatgtaatatagggtttgtttgctgcttttgatggctacgttttggagagagcaatcttgctgtgaaacagtgtggatgtaaattttataaggctgactcttactaaccaccatttcccctgtggtttgttatcagtacaattctttgttgcttaatctagagctatgcacaccaaattgctgagatgtttagtagctgataaagaaacctcttaaaaaaataatataaatgaatgaaatataaactgtgagataaatatcattatagcatgtaatattaaattcctcctgtctcctctgtcagtttgtgaagtgattgacattttgtagctagtttaaaattattaaaaattatagactcc

SEQ ID NO: 136 - DNA, 497 bp, Homo sapiens
atcttgacgaggctgcggtgtctgctgctattctccgagcttcgcaatgccgcctaaggacgacaagaagaagaaggacgctggaaagtcggccaagaaagacaaagacccagtgaacaaatccgggggcaaggccaaaaagaagaagtggtccaaaggcaaagttcgggacaagctcaataacttagtcttgtttgacaaagctacctatgataaactctgtaaggaagttcccaactataaacttataaccccagctgtggtctctgagagactgaagattcgaggctccctggccagggcagcccttcaggagctccttagtaaaggacttatcaaactggtttcaaagcacagagctcaagtaatttacaccagaaataccaagggtggagatgctccagctgctggtgaagatgcatgaataggtccaaccagctgtacatttggaaaaataaaactttattaaatcaaaaaaaaaaaaaaaaaaaaaaaaa

SEQ ID NO: 137 - DNA, 2457 bp, Homo sapiens
tttaaaataaaatacatttataactggcaatgtttaaaaagagaaacaaactgagttccactgaaattaagagattttctcggtctctgggcgggccgtgggaggcttcctgaggtgggggccgggccaggatggctgcagcgcagcgacggccggggccgggagcgggcctgggcggccaggagaagcagttcccgccggcgctgctgagtttcttcatctacaacccgcgcttcgggccgcgcgaaggacaggaggaaaataagattttattttatcatccaaatgaggtagaaaagaatgagaagattagaaatgtcggattgtgtgaagctattgtacagtttacaaggacatttagcccatcaaaacctgcaaaatctttacatacacagaagaacagacagttcttcaatgaaccagaagaaaatttctggatggtcatggttgttcggtgtcctataattgaaaaacagagtaaagatggaaaaccagttattgaatatcaagaggaggagttgttggacaaggtttatagctcggtgctgcggcagtgctacagcatgtacaagctttttaatggtacatttcctgaaagccatggaagacggagggtccaacttctgaaagaaagattagagaaattcttccatcggtatttgcaaacgctacatttgcagtcatgtgacctacttgacatttttggtggaatcagcttcttcccgttggataaaatgacttatttgaaaatccagtcctttattaatagaatggaggaaagcctgaatatagtcaaatacactgcttttctctataacgatcagctcatctggagtggattagaacaagatgacatgagaattttatacaaataccttaccacctcccttttcccaaggcacatcgaacctgagttagcaggaagggattctccaataagagcagaaatgccaggaaatcttcaacactatggaagatttcttaccggacccttgaacctcaatgatccagatgcaaaatgcagattccccaaaatttttgtaaatacagatgacacttatgaagagctccatttaatcgtttataaggccatgagtgcggctgtgtgctttatgatcgacgcctctgtccacccaacgttggatttttgccgaagactggacagcatcgttgggccccagctcacagtgctggcctctgacatctgtgaacagtttaacatcaacaagaggatgtccgggtctgagaaagaaccccagtttaagtttatctacttcaaccacatgaatctcgccgagaagagcacagttcacatgaggaaaacgcccagcgtgtcgctcacttccgtgcacccggatttaatgaagattctcggtgacatcaacagtgactttaccagagtggatgaagatgaggagatcattgtgaaggccatgagtgattactgggttgttggaaagaagtctgatcggcgggactcctatgttattttgaatcaaaaaaatgcaaacctgattgaagtaaatgaagaggtcaagaaactttgtgcaacgcagttcaacaacatcttcttcttggattgacggatgacggctcaccgagagcatatctaaaaaacactctgcaaacatttggtcacatgcaagttagtggtcatatgacggactgcattcaggacaagggtaaagcaatacttgctttgaagaatcacatttcgactcggtctgctgatctgaggtttttagattttaaatatttatgtggaattaattaaaggtagttggctatatcgctatcatttcattcttttgacattatgtgaatattttactggaaaataagactaataaattgttaaaagtttttaaaattctggtttggtgttgagtctctctcctgctgcctatttatagattacactggccaccagctccgtgacccaggctggaatgcaatggctcactgcagcctcaacctcctgagctcaagcaatcctcccacctcagcctcccaagaagctagaaccacatgtacacaccaccacggtcggctgatgttttaattttgcagagatgggggggtctcactatgttgcccaggctggtctcgaactcccgtaatccagccatgtaggaaacctgagatgcagtgggccaaggggtatgttaaaacactgtgacgagttcagtgctaagaactgtaatgctcaggaaatcttacagcacgtgccatcctaagcctgtgtgtgtgtcctcgtgtctctctactttttcttcttcttgctggtgatggtcttgctggatggggacacggtcacatcctccttgggagggtccagtatgaggtgagaggatgacacgtctgccggctcctttagcactgtgatgtccacctcataagtcatgtctcttgggcctcttcctctctcaagatgaagatgttcagccttgcttccag

SEQ ID NO: 138 - DNA, 376 bp, Homo sapiens
  misc_feature (1)..(376): where n may be a or g or c or t/u, unknown, or other
ttttttttttttttccttaaatacatgtttattttacttcaatatcgctcagggttgtatgtatttgaatacttcagtactattttgaacattctaaatatgaaataccataaagcgttcaaatttatcaaacagtggtacaatatggttactaaacttgcaacttaatttacaatgacgttcaatttttcctcttcaaataaaatcactgactttggtccatttgatgagaaactaggacatatgccatgacagcatacttctnggcactctatgtaatagggcaaanggataatttnggctaatataggacagggntacctggactgaaattctacttttctgcttaattgatcacgttccaagggtnactaca

SEQ ID NO: 139 - DNA, 2149 bp, Homo sapiens
agcgccttcgctctttggctccctgagttagtccggttgtttgcgatcgccgcggccggggctgcgaaccgaagggctcgctccgcgccgcctgggtctctacctcatccgtaggtgtggccctgatggtgtggcaggctctggactcctaaagctctggagcgaatttaagattttattcatgtgcatggcatagaagatgaattcttccacttccaccatgagtgaagagcctgacgctctatcggtagttaaccagttacgggatctagcagcagatccgttaaacagaagagccatcgtccaggatcagggatgtctgcctggccttattttatttatggaccatcccaaccctccagtcgtccactccgctttgcttgctcttcgatacttggcagaatgccgtgcaaacagagaaaagatgaaaggagaactgggtatgatgttgagcttacaaaatgttatacagaaaactacaactccaggagaaacaaaacttctggcctctgaaatctatgacattcttcagtcctccaatatggcagatggtgatagttttaatgagatgaattcacgtcgaaggaaagctcaattttttctgggaactacaaacaaacgtgccaaaacagtggttttgcatatagatggccttgatgatacgtctcggagaaatctatgtgaagaggctttgttaaaaattaaaggtgttattagctttacttttcaaatggctgttcaaaggtgtgtggtgcgaatccgttcagatttgaaagctgaggctttggcatcagcaatagcatcaaccaaggttatgaaagctcagcaagttgtgaaaagtgaaagtggagaagagatgttggtcccattccaagatactcctgtggaagttgaacagaacacagagctacctgactacctgcctgaggatgagagtcccacaaaggaacaggacaaagcggtgtcccgggtcggctcacacccagaaggtggagctagctggcttagcacagctgcaaactttttatccagatcattttattggtgacttcacttttgggctcaaggactgtgtgaaccaacaaggggccagttttccattgttgtggtgaactgtcaagtgcaatttgcaataagttatcatgaaaagtttttagattacacgatcgcatatgctgcatttcacattttattggacattttaccccactgagtggtaaaaaggacagaggctacagatggagttgctttgtttatgaaagtattttggtttgttttctttcatttaattgcctcatatttaaaaaccatgggtccactgttaaaaccacatgtgtatgtgcagctttacattttattttacgtgaagcatgtgattaggaaaactcattttcttttcaagcctcaggacctacctgaagagaagttttcttgtagctcaagttgtgcatgaattactgaatattttactgtgcttttcttcatgaagggtacatgctttgtactcttcactgaaagctgaaaacatttcttgttaccctcttttgtgcctttttattttgccaaccgtgtttatagaaaggacattactaatgacattttgcagattaaaaacattcatttgaacacagtagtcccctagaaaaacaactctacaaaaattttgcagccttattcattataattttgataaaattaacacaaaatcagtcaagaaggaaacatgtatattagtgaagtgtttttggagactgtttgaatgtgaccaaatgtggttctagttgacttcttttcactttggcttatatcaattcttgagagttaatgtgatcatgatattgcaaacaactataaatggtctctaggccttactttgtgattatacgttatctccggctagaaaaaaataatggtagtaaagaaactgacaaactgaaaataagaaaacaaaaatcaaatgcctataataccataatgccagtttggtatagagtccaactttaaaacatgaattgctcgacagagttctattcagtaggtgtttccttgtattgtcttttgtgaatttattatgaaaatgctgcgttgtgttgaatgaaaaagacccaaattactgcttatgaagaaataaagccagcattgatcactt

SEQ ID NO: 140 - DNA, 4459 bp, Homo sapiens
gtttctctctctccttctctctctctctctctctctcttttttttccgccctagctggggctgtgttggaggagaggaagaaagagagacagaggattgcattcatccgttacgttcttgaaatttcctaatagcaagaccagcgaagcggttgcacccttttcaatcttgcaaaggaaaaaaacaaaacaaaacaaaaaaaacccaagtccccttcccggcagtttttgccttaaagctgccctcttgaaattaattttttcccaggagagagatgtcttatcaggggaagaaaaatattccacgcatcacgagcgatcgtcttctgatcaaaggaggtaaaattgttaatgatgaccagtcgttctatgcagacatatacatggaagatgggttgatcaagcaaataggagaaaatctgattgtgccaggaggagtgaagaccatcgaggcccactcccggatggtgatccccggaggaattgacgtccacactcgtttccagatgcctgatcagggaatgacgtctgctgatgatttcttccaaggaaccaaggcggccctggctgggggaaccactatgatcattgaccacgttgttcctgagcctgggacaagcctgctcgctgcctttgaccagtggagggaatgggccgacagcaagtcctgctgtgactactctctgcatgtggacatcagcgagtggcataagggcatccaggaggagatggaagcgcttgtgaaggatcacggggtaaattccttcctcgtgtacatggctttcaaagatcgcttccagctaacggattgccagatttatgaagtactgagtgtgatccgggatattggcgccatagcccaagtccacgcagaaaatggcgacatcattgcagaggagcagcagaggatcctggatctgggcatcacgggccccgagggacatgtgctgagccgacctgaggaggtcgaggccgaagccgtgaatcgtgccatcaccatcgccaaccagaccaactgcccgctgtatatcaccaaggtgatgagcaaaagctctgctgaggtcatcgcccaggcacggaagaagggaactgtggtgtatggcgagcccatcactgccagcttgggaacggacggctcccattactggagcaagaactgggccaaggctgctgcctttgtcacctccccacccttgagccctgatccaaccactccagactttctcaactccttgctgtcctgtggagacctccaggtcacgggcagtgcccattgcacgtttaacactgcccagaaggctgtaggaaaggacaacttcaccctgattccggagggcaccaatggcactgaggagcggatgtccgtcatctgggacaaggctgtggtcactgggaagatggatgagaaccagtttgtggctgtgaccagcaccaatgcagccaaagtcttcaacctttacccccggaaaggccgcattgctgtgggatccgatgccgacctggtcatctgggaccccgacagcgttaaaaccatctctgccaagacacacaacagctctctcgagtacaacatctttgaaggcatggagtgccgcggctccccactggtggtcatcagccaggggaagattgtcctggaggacggcaccctgcatgtcaccgaaggctctggacgctacattccccggaagcccttccctgattttgtttacaagcgtatcaaggcaaggagcaggctggctgagctgagaggggttcctcgtggcctgtatgacggacctgtgtgtgaagtgtctgtgacgcccaagacagtcactccagcctcctcggccaagacgtctcctgccaagcagcaggccccacctgtccggaacctgcaccagtctggattcagtttgtctggtgctcagattgatgacaacattccccgccgcaccacccagcgtatcgtggcgccccccggtggccgtgccaacatcaccagcctgggctagagctcctgggctgtgcgtccactggggactggggatgggacacctgaggacattctgagacttctttcttccttcctttttttttttttgtttttttttttaagagcctgtgatagttactgtggagcagccagttcatggggtcccccttggggccccacaccccgtctctcaccaagagttactgattttgctcatccacttccctacacatctatgggtatcacacccaagactacccaccaagctcatacagggaaccacacccaacacttagacatgcgaacaagcagcccccagcgagggtctccttcgccttcaacctcctagtgtctgttagcatcttccttttcatggggggagggaagataaagtgaattgcccagagctgcctttttcttttctttttaaaaattttaagaagttttccttgtggggctggggaggggccggggtcagggagagtctttttttttttttttttaaatactaaattggaacatttaattccatattaatacaaggggtttgaactggacatcctaatgatgcaattacgtcatcacccagctgattccgggtggttggcaaactcatcgtgtctgtcctgagaggctccacaatgcccacccgcatcgccattctgtagtcttcagggtcagctgttgataaaggggcaggcttgcgttattggcctagattttgctgcagattaaatcctttgaggattctcttctcttttaccatttttctgcgtgctctcactctctctttctctctctagctttttaattcatgaatattttcgtgtctgtctctctctctctctgtgtttcctccagcccttgtctcggagacggtgttttcctcccttgccccattatcttttcacctcccaggtctaccatttcatggtggtcgttgggtccgcctaaaggatttgagcgtttgccattgcaagcatagtgctgtgtcatcctggtccatgtaggactggtgctaaccacctgccatcatgaggatgtgtgctagagtgtgggaccctggccaagtgcaggaatgggccatgccgtctcacccacagtatcacacgtggaaccgcagacagggcccagaagctttagaggtatgaggctgcagaaccggagagattttcctctgtgcagtgctctctggctaaagtcacggtcaaacctaaacaccgagcctcattaacccaagtgaaccaaccaaagtcaccagttcagaagtgctaagctaataggagtctgacccgagggcctgctgcttcctggttaagtatcttttgagattctagaacacatgggagctttttattttcggggaaaaaccgtatttttttcttgtccaattatttctaaagacacactacatagaaagaggccctataaactcaaaaagtcattgggaaacttaaagtctattctactttgcaagaggagaaatgtgttttatgaacgatagatcacatcagaactcctgtggggaggaaaccttataaattaaacacatggcccccttagagaccacaggtgatgtctgtctccatccttccctctccttttctgtcacctttccccctagctggctcctttggacctacccctgtccttgctgacttgtgttgcattgtattccaaacgtgtttacaggttctcttaagcaatgttgtatttgcaggcttttctgaataccaaatctgctttttgtaaagcgtaaaaacatcacaaagtaggtcattccatcaccacccttgtctctctacacattttgcctttggggatctggttggggttttgggttttttgttgttgttgtttatttgttattttaaaggtaaattgcacttttaaaaaaataattggttgacttaatatatttgctttttttctcacctgcacttagaggaaatttgaacaagttggaaaaaaacaatttttgtttcaattctaagaaacacttgcagctctagtattcacttgagtcttcctgtttttcctgtaccgggtcatggtaatttttggttgttttggttgttttcttaaaaaacaagttaaaacctgacgatttctgcaggctgtgtaagcatgtttacctgttggcttgctttgtgtgtctgttaaatgaatgtcatatgtaaatgctaaaataaatcgacagtgtctcagaactgaataactgcagtgacttgatgctctaaaacagtgtaggatttaagaatagatggtttttaatcctggaaattgtgattgtgacccatgagtggaggaactttcagttctaaagctgataaagtgtgtagccagaagagtacttttttttttgtaaccactgtcttgatggcaaaataattatggtaaaaaacaagtctcgtgtttattattccttaagaactctgtgttatattaccatggaacgcctaataaagcaaaatgtggttgtttc

SEQ ID NO: 141 - DNA, 2279 bp, Homo sapiens
ggcacgaggccgcagcagccaccgccgcagcagccgccaccgcatcagccgccgccgcatccacagccgcatcagcagcagcagccgccgccaccgccgcaggactcttccaagcccgtcgttgctcagggacccggccccgctcccggagtaggcagcgcaccaccagcctccagctcggccccgcccgccactccaccaacctcgggggccccgccagggtccgggccaggcccgactccgaccccgccgcctgcagtcacctcggcccctcccggggcgccgccacccaccccgccaagcagcggggtccctaccacacctcctcaggccggaggcccgccgcctccgcccgcggcagtcccgggcccgggtccagggcctaagcagggcccaggtccgggtggtcccaaaggcggcaaaatgcctggcgggccgaagccaggtggcggcccgggcctaagtacgcctggcggccaccccaagccgccgcatcgaggcggcggggagccccgcgggggccgccagcaccacccgccctaccaccagcagcatcaccaggggcccccgcccggcgggcccggcggccgcagcgaggagaagatctcggactcggaggggtttaaagccaatttgtctctcttgaggaggcctggagagaaaacttacacacagcgatgtcggttgtttgttgggaatctacctgctgatatcacggaggatgaattcaaaagactatttgctaaatatggagaaccaggagaagtttttatcaacaaaggcaaaggattcggatttattaagcttgaatctagagctttggctgaaattgccaaagccgaactggatgatacacccatgagaggtagacagcttcgagttcgctttgccacacatgctgctgccctttctgttcgtaatctttcaccttatgtttccaatgaactgttggaagaagcctttagccaatttggtcctattgaaagggctgttgtaatagtggatgatcgtggaagatctacagggaaaggcattgttgaatttgcttctaagccagcagcaagaaaggcatttgaacgatgcagtgaaggtgttttcttactgacgacaactcctcgtccagtcattgtggaaccacttgaacaactagatgatgaagatggtcttcctgaaaaacttgcccagaagaatccaatgtatcaaaaggagagagaaacccctcctcgttttgcccagcatggcacgtttgagtacgaatattctcagcgatggaagtctttggatgaaatggaaaaacagcaaagggaacaagttgaaaaaaacatgaaagatgcaaaagacaaattggaaagtgaaatggaagatgcctatcatgaacatcaggcaaatcttttgcgccaagatctgatgagacgacaggaagaattaagacgcatggaagaacttcacaatcaagaaatgcagaaacgtaaagaaatgcaattgaggcaagaggaggaacgacgtagaagagaggaagagatgatgattcgtcaacgtgagatggaagaacaaatgaggcgccaaagagaggaaagttacagccgaatgggctacatggatccacgggaaagagacatgcgaatgggtggcggaggagcaatgaacatgggagatccctatggttcaggaggccagaaatttccacctctaggaggtggtggtggcataggttatgaagctaatcctggcgttccaccagcaaccatgagtggttccatgatgggaagtgacatgcgtactgagcgctttgggcagggaggtgcggggcctgtgggtggacagggtcctagaggaatggggcctggaactccagcaggatatggtagagggagagaagagtacgaaggcccaaacaaaaaaccccgattttagatgtgatatttaggctttcattccagtttgttttgtttttttgtttagataccaatcttttaaattcttgcattttagtaagaaagctatctttttatggatgttagcagtttattgacctaatatttgtaaatggtctgtttgggcaggtaaaattatgtaatgcagtgtttggaacaggagaatttttttttcctttttatttctttattttttcttttttactgtataatgtccctcaagtttatggcagtgtaccttgtgccactgaatttccaaagtgtaccaatttttttttttttactgtgcttcaaataaatagaaaaatagttataatattgatcttcaaaaaaaaaaaaaaaaaa

SEQ ID NO: 142 - DNA, 2320 bp, Homo sapiens
ggcaggttcgcgggtcgctggcgggggtcgtgagggagtgcgccgggagcggagatatggagggagatggttcagacccagagcctccagatgccggggaggacagcaagtccgagaatggggagaatgcgcccatctactgcatctgccgcaaaccggacatcaactgcttcatgatcgggtgtgacaactgcaatgagtggttccatggggactgcatccggatcactgagaagatggccaaggccatccgggagtggtactgtcgggagtgcagagagaaagaccccaagctagagattcgctatcggcacaagaagtcacgggagcgggatggcaatgagcgggacagcagtgagccccgggatgagggtggagggcgcaagaggcctgtccctgatccagacctgcagcgccgggcagggtcagggacaggggttggggccatgcttgctcggggctctgcttcgccccacaaatcctctccgcagcccttggtggccacacccagccagcatcaccagcagcagcagcagcagatcaaacggtcagcccgcatgtgtggtgagtgtgaggcatgtcggcgcactgaggactgtggtcactgtgatttctgtcgggacatgaagaagttcgggggccccaacaagatccggcagaagtgccggctgcgccagtgccagctgcgggcccgggaatcgtacaagtacttcccttcctcgctctcaccagtgacgccctcagagtccctgccaaggccccgccggccactgcccacccaacagcagccacagccatcacagaagttagggcgcatccgtgaagatgagggggcagtggcgtcatcaacagtcaaggagcctcctgaggctacagccacacctgagccactctcagatgaggacctacctctggatcctgacctgtatcaggacttctgtgcaggggcctttgatgaccatggcctgccctggatgagcgacacagaagagtccccattcctggaccccgcgctgcggaagagggcagtgaaagtgaagcatgtgaagcgtcgggagaagaagtctgagaagaagaaggaggagcgatacaagcggcatcggcagaagcagaagcacaaggataaatggaaacacccagagagggctgatgccaaggaccctgcgtcactgccccagtgcctggggcccggctgtgtgcgccccgcccagcccagctccaagtattgctcagatgactgtggcatgaagctggcagccaaccgcatctacgagatcctcccccagcgcatccagcagtggcagcagagcccttgcattgctgaagagcacggcaagaagctgctcgaacgcattcgccgagagcagcagagtgcccgcacccgccttcaggaaatggaacgccgattccatgagcttgaggccatcattctacgtgccaagcagcaggctgtgcgcgaggatgaggagagcaacgagggtgacagtgatgacacagacctgcagatcttctgtgtttcctgtgggcaccccatcaacccacgtgttgccttgcgccacatggagcgctgctacgccaagtatgagagccagacgtcctttgggtccatgtaccccacacgcattgaaggggccacacgactcttctgtgatgtgtataatcctcagagcaaaacatactgtaagcggctccaggtgctgtgccccgagcactcacgggaccccaaagtgccagctgacgaggtatgcgggtgcccccttgtacgtgatgtctttgagctcacgggtgacttctgccgcctgcccaagcgccagtgcaatcgccattactgctgggagaagctgcggcgtgcggaagtggacttggagcgcgtgcgtgtgtggtacaagctggacgagctgtttgagcaggagcgcaatgtgcgcacagccatgacaaaccgcgcgggattgctggccctgatgctgcaccagacgatccagcacgatcccctcactaccgacctgcgctccagtgccgaccgctgagcctcctggcccggaccccttacaccctgcattccagatgggggagccgcccggtgcccgtgtgtccgttcctccactcatctgtttctccggttctccctgtgcccatccaccggttgaccgcccatctgcctttatcagagggactgtccccgtcgacatgttcagtgcctggtggggctgcggagtccactcatccttgcctcctctccctgggttttgttaataaaattttgaagaaaccaaaaaaaaaaaaaaaaaaaaaaaaaaaaaaaaaaaaaaaaaaaaaaaaa

SEQ ID NO: 143 - DNA, 3434 bp, Homo sapiens
agtccccacagctgcgccggtgactgaggggccgggcagtggagaagtggtggcggcgggcggcgggcggcaaaggagcagccatgagggccgggcccagtcaccgaccgtgctgaggagtcatggaagagtttttaaaccagtgtgagccactgccccatgttgtgttgatgccaatctgccatgctagcctgtctaccagggccaggtgacctgtcctttcagcctctttctcacacgcagatgaacactggacttcagaaatgggacactacacagaaaatgagaactgctcactatcctaccccagccgaattggatgcgtatgctaagaaggtcgcaaacaacccactgactataaaaatcttccccaacagtgtgaaggttccccagcggaaacacgttcgtcgtactgtgaacggcctcgacacatcagcccagcgctacagcccctacccgacacaggctgccaccaaggcaggcctgcttgccattgtcaaagtgccagccaaaagcatactcaaggactttgacggcacccgagcccggttgctccctgaggccatcatgaaccccccagtggcaccctatgctactgtggcacccagcactttagcccacccccaggcccaggctctggcccgccagcaggccctgcagcatgcacagaccctggcccatgcccctccccagacgctgcagcaccctcagggtatcccgccaccccaggcactgtcccaccctcagagcctccagcagcctcagggcctgggccaccctcagcccatggcccaaacccagggcttggtccaccctcaggccctggctcaccagggtctccagcacccccacaatcccttgctgcatggaggccggaagatgccagactcagatgcccccccgaatgtgaccgtgtctacctcaactatccccctttcaatggcggccactctgcagcacagccggcctccggacctgagtagcatcgtgcaccagatcaaccagttttgccagacgagggcaggcatcagcactacctcagtgtgtgagggccagatcgccaaccccagccccattagtcgcagtctgctcatcaatgcaagcacccgggtgtcgacccacagcgtccccacaccaatgccttcatgtgtggtcaatcccatggagcacacccacgcggccaccgccgcgttgcctgctgcaggtcctgtcaacctgcccacaggcatctctcgcgtccccactggctaccctagcgacctcaagccagtcacctggaaccagcaccagctggcccacctacagcagatgtgcagcgaggctagtgggacgccagcccctggcctgacaggcaagcatgcggcaggacgcgagttggcagggcctggctttgtgggcaaggcccctgcctacccgcaggaactctgcctggcgcagtccttccatctgaagccacccctggaaaagccgaccccatccccaccagtcaacggcatggcagccccattggcctaccccaatggtcactacttccaacccctgtggaacaacattctgcccactcccaatagcgacagctcggggtctcaggaccttgccatgccgttccacggtgggcagcccacaggtgcacccctcgactgtgcggcagctcccggggcccactaccgagcagggaccgggggcggtccagtggcaagccagaacagcttgatgcaaacagtggattacctaagtggggatttccaacaggcctgcttccgagaacagagcctggccatgctgagcaaggcccaccgagcccctggcaaccgagcccccgatcccacagagagtcgaagtcttcatattctgcacccagggtatagataggtagccctgctgccctccacgtgcaacacatcatacatcaccctcctaggtttagtcttttaagtaactggatagtttcaaagtttcactgctccagtgtgatcattcttagatgtctaagaaagggaatttggtgggatctaagtggggacagaaggggtcctctcgtcctcccctccagcaacttttggttttatgttagaacctaaccctaagcccaggcttttctctccactgactgcctgtcagctagtctctccaccttggccatttccagccagctcccacccatcttttcttgaatctcttcctgtttcccttaggacgactgaggtgtgggctgacggaatgccctagttgaggtagtataggtgctcaggcccctaatccagacctctacctgttgctaccccccttcccctccctccaggactaagaagcaagatttcccaggtgctctgaaagctaattacttactcatcggaggatctcaaatcaaagctgacccagtcttcatatccttcaagttcctttccattcctcaaggctttgttttgtgtctatattgatcccacagccactgcacttgcccttgccacacttgatctcaagggcatcttggaagtatttgaccatttcttgagatatggggggaaaaagtctttgtattggcatcttggttccagactcccctttccaaacctagaaaaatacagtgacctttgagcatacccaagatccctttctcactgttgcctgtcccctaactcacctccccacagcccctatcctttccccctcaacaaaaacaaaatctaccttacttgaggaattaggtaggtaaggaatgatcacattggagtttgggattaaaaacaccaaaaaaaaaaaaatgcatttggttctctctacactggctaagaatattgctctacactgtaagttttaaacgttacgtttctgtatgaatgtagtgtgggtttgagtagcattgtgtgtgagtggccccacaggtagattcaccctctagtgcagcccctcagtttaatgaaggaaaaaaaaaacaaacacaaagccttaagctctttgagtacttcctttaccaaatgagcatggttctaacacctggagctgggcctacattggaaacaagcccctcctgccctctgtccattcttagagcataccttcatccactccatgctcagcacgtctcatcccaagcgacaattagttggctagaaacacttttctgtaattttaaacttagactgttttgttacaaatttttgcaccattctgttaaagatgcagaattgggcttttttattttttacagatgaaataagcccttacctttcctcttgtctctggggaatgtcagctgatggttcttatttaaggttttgcattttgttcactatccactactgttcgttagccagaaattctctagtgatctgaagcaatgtgactgaagaccagttttaagttatgtgttggcaagttgccttatatttaaaaggaaaaagaaaaaaaaaaaagcctgattgtgttatgcc

SEQ ID NO: 144 - DNA, 1869 bp, Homo sapiens
ggcacgagggtacgctcaaagccgaagccacagctcctcctgccgcatttctttcctgcttgcgaattccaagctgttaaataagatgtgcaaagggcttgcaggtctgccggcttcttgcttgaggagtgcaaaagatatgaaacatcggctaggtttcctgctgcaaaaatctgattcctgtgaacacaattcttcccacaacaagaaggacaaagtggttatttgccagagagtgagccaagaggaagtcaagaaatgggctgaatcactggaaaacctgattagtcatgaatgtgggctggcagctttcaaagctttcttgaagtctgaatatagtgaggagaatattgacttctggatcagctgtgaagagtacaagaaaatcaaatcaccatctaaactaagtcccaaggccaaaaagatctataatgaattcatctcagtccaggcaaccaaagaggtgaacctggattcttgcaccagggaagagacaagccggaacatgctagagcctacaataacctgctttgatgaggcccagaagaagattttcaacctgatggagaaggattcctaccgccgcttcctcaagtctcgattctatcttgatttggtcaacccgtccagctgtggggcagaaaagcagaaaggagccaagagttcagcagactgtgcttccctggtccctcagtgtgcctaattctcacctgaaggcagagggatgaaatgccaagactctatgctctggaaaacctgaggccaaatattgatctgtattaagctccagtgctttatccacattgtagcctaatattcatgctgcctgccatgtgtgagtcacttctacgcataaactagatatagcttttggtgtttgagtgttcatcagggtgggaccccattccagtccaattttcctaagtttctttgagggttccatgggagcaaatatctaaataatggcctggtaggtctggattttcaaagattgttggcagtttcctcctcccaacagttttacctcgggatggttggttagtgcatgtcacatgacatccacatgcacatgtattctgttggccagcacgttctccagactctagatgtttagatgaggttgagctatgatatgtgcttgtgtgtatgtctatgtgtatatattatatatacattagacacacatatacattatttctgtatatagatgtctgtgtatacatatgtatgtgtgagtgtatgtacacacacacacacacacacacacacttttgcaagagtgatgggaaagaccctaggtgctcataactagagtatgtgtatgtacttacatgggtgttttgatctctgttctttcatactacatttgaacagggcaaaatgaactaactgccatgtaggctaagaaagaaatgctaacctgtggaaagttggttttgtaaaattccatggatcttgctggagaagcatccaaggaacttcatgcttgatttgaccactgacagcctccaccttgagcactattctaaggagcaaataccttagctcccttgagctggttttctctgatggcacttttgagctcctaagctgccagccttcccttcttttcctgggtgctcagggcatgcttattagcagctgggttggtatggagttggcagacaggatgttcaacttaatgaagaaatacagctaaggccttgccagcaacacctgccgtaagttactggctgagtgagggcatagaagttaaaggttactgtttttatcctctatccttttttcctttcctaaaagcactctgagtcaagatgagtgggaaaccatctcaataaacacattttggataaaaaaaaaaaaaaaaaa

SEQ ID NO: 145 - DNA, 3658 bp, Homo sapiens
ccaggatctcctctgggggagttttctattaccagaaacttcattacatcagaatccaaactcatgatcctctcttgaaaacagacactcctcttgagctcctgggctttctcgtttcctcctttggtggtgccatgacgctcccagctgccctggcctgccatccttgctttgttgtgtccccagacacccacagtcagcaagtcctgctgaatcttcttccagagagttgttgaattccagcctgggtgacagaacgagactctgtctgaaaaaaaaaaaaggaggaatgatactacctgttaatgatactacctgttaggattattggggtattaaatgagatgatttgacaaagtgccatttaaagtatatagcattagataaatattttatcttttgtggactttaacaaatagtttattgatggaaattttttaaaaaagcttttaagttacacattttaagttcctgctactgaaagcaggattaactagtctgtagaataatagtaattttttaattttgtctccttagctcattacctaaaggacttattgtaaataagctatttaagatcttaagaaatactgtatttttttaaatggaaggctaagaaaaacataaacagcctaagcatgtgcattaaaactttgttgacttataagattattcaaaatatgttattttaattttggaattatattgtttactttaggcagcagaacttgctgaattcactgccaagattgcacttctagaggaagccaagaagaaaaaggaagaggaagctactgagtggcaacacaaagcttttgcagcccaggaagacttggaaaagaccaaagaagagttaaaaactgtgatgtctgccccccctccacctccaccaccaccagtcattcctccaacagaaaacgaacatgatgaacacgatgagaataatgctgaagctagtgctgaattatcaaatgaaggggtaatgaaccatagaagcgaggaagaacgtgtaaccgaaacacagaaaaatgagcgtgttaagaagcaacttcaggcattaagttcagaattagcccaagccagagatgaaaccaagaaaacacaaaatgatgttcttcatgctgagaatgttaaagcaggccgtgataagtacaagactctgcgacagattcgacaaggcaatacaaagcagcgtatcgatgagtttgaagcaatgtgagagctgttattttgcatatatgttcttcataagctgaaccaccaacagagaaaagcaggcctttgcagatatgatggaatgcatcccaccttgccaaagcacttacaccagtttgactgtgctagctaaaagacaaatttaaggggagctcttcaacattaaggcagtatgatatcatgcttggttttcttttttcttttggtccagggaatggagaatggtgttccattgcctcttttcacattttttttctttttcttttttttttctgttgaagattaacactaattatcacgtctgacaaatgtgtatgtgtggtttcagttctgtgtacattttaaaggataatggtgaacattttaatgggtttcccttgccctttccatatttaacctatttccacattctctctcactcacattttctcagtgtgcccttctcttatctgccatgtccatagccataattccaccatcatacagatcaggcagtgtttaaaatgatggtaggtagcacagtggacagtctttgatcatcatgtagaatatggctatgaatcaggaaagagattagaacatttaataatgtatgtacagctggtgcttagtttttttttaatctaaatttaattaccttattggatatttgatatttggttatttaatcacagtcatctttaacagcttacactgattggtgttttatctcctgtgatcctttgatggctttttttgcctaccatttcacagaggtttagacagcagtagtagctccctaggagagtttactgatgaaacagcctctgcaagattttaaaagttttgttcttttatagactgatttagaaaaacaaatgattagttaaaaaaagaaaatatacatttgttggtaactaatgttattttttaaaacctggacctttctggaagggcagcatataaaaacatcagtcccgaggaggggacaacaatactacctcactactacatctgtgatgactggttgttcaaacacaatggagtgtgtaaggtatatgttttataattcataaccatagcctcgatcatcaagaaatactttcgaaatttcattttccttcagaatatcttaagagtgctaaatttttaactgcctttttgtcgagtcaaactgtgggattctgatttgtattaaaattgtaagctcctcactggtatactatcatcctggaggggtgttgtatggctgagcaagagagagagagaatgagagagagactgtgtgtgtgtgtgtgtgtgtgtgtactctgtgtgtgtatgagagagagagagaaatgctaaccttgtagcatgtgaagaatgtctgtaccttgatacgatagttacataatcagtatatttggtttctagatcactgtgcttattttgtttcaatctctgactaaaaatacttaaatttggtttgttaattcttattttagaaattataattttagtttatattaatttcggttatagcttactgaagaaatctttccagttagaaggaggttctaatattcacatgttctaatactttgtttattgtaaaacagctaaatttggagatacgtaaagccttgttttctctgtgtggttcagctactttccatttggtattacacagtcaaatttacatttatctattaaaattgccattttattaaacattttcatgcacagtagattcaagttgtgtctgaaaatatctcttgtgcttttttgattttgctgactttaaaaggattaatctgggcagacattatgtaaaagaaaggttgcgtttaatatattttttgaactttgtaggacaaaacatagctggttaaccttgaagtgactgttgtaccatggttgtgcacatgcttcagaatcctatggaagagaatattcctacttgcagtacatcaaaggaatggatggtggaccctactattcatgttttgagacataaatgttcactttaaagcaattgcataatagataaaaacctgaactttcattggatttttgttaattttcctcattttgaattatgtgcactaccatagctacatcagtttgatacagtattgaaaaattatcagttatattttgctgtttatgatctatttgtagattaggattaaaatggatttaatccatttttaaggctgtgtgaatttttctaaacaagaaccatttgcaatatggatttcttagagattaaaccaattataacttattagcagtcgcgagcacatgttcatatagtcaatgtaaaaatacactaatgagtatttggtaaatcccagtaggcttttaccattagcataattttgtgttgtacaattaagttacaattacatctctaattttggataatattcattggttaacaataaagtgacaaaagctcatgcaaaaaaaaaaaaaaaaaaaa

SEQ ID NO: 146 - DNA, 1757 bp, Homo sapiens
cgagcactaagtcctctgagttccgcagcgcagcaccggaagcggccgagcgcgctcagcccggcgacccctgcgggctccagacccctgcgccgctgcgccccgggtttcgccgcaaccaagacccagcgagtgcagcggcggccgctgaggaggttcgaaaacatggccaaaagaaatgccgagaaggaactgacagataggaattgggatcaagaagatgaagctgaagaggtgggaacattctccatggccagtgaggaagtcttgaagaatagagccataaagaaagcaaagcgcagaaatgttggatttgaatctgacactggaggagcctttaaaggttttaaaggtttggtggtaccttctggaggaggacgcttttctggatttggtagtggcgctggagggaagcctttggaaggactgtcgaatggaaacaacataaccagtgcccctcccttcgccagtgcaaaggcagcggcagatcccaaggtagcctttggttctcttgctgcaaatggccctaccaccttggttgataaagtttcaaatcccaaaactaatggggacagtcagcagccctcctcctctggccttgcttccagtaaagcttgtgtcggaaatgcctatcacaagcagttggccgccttgaactgctccgtgcgggattggatagtgaagcacgtgaatacaaaccccctctgtgatctgacacctatctttaaagactatgagaaatatttagcaaacattgaacagcaacacgggaacagtggcaggaattctgaaagtgaatctaacaaagtggcagctgaaacacagtctccttccctttttggctcaacaaaattacagcaagagtcaagctttttgtttcatggcaacaaaactgaagatacacctgacaagaagatggaggtggcatctgaaaagaaaacggacccatcatcactaggagcgacaagtgcctcatttaatttcggcaagaaagttgatagctctgttttgggctcattaagctctgtccccctgactggattttctttctcccctggaaactccagtttatttggcaaagatactacccagagtaaaccagtctcttcaccatttcccactaaaccattggagggccaagcagaaggtgacagtggtgaatgcaaaggtggagatgaagaagagaatgatgagccacccaaagtagtagttaccgaagtaaaagaagaagatgctttttactccaaaaagtgtaaactgttttacaagaaggacaatgagtttaaagagaaaggcataggtactctgcatttaaaacctacagcaaatcagaagacacagcttttggtgcgggcagacaccaatttaggcaacatattgctgaacgttctgattccacccaatatgccatgtacgcgaacagggaagaataacgttcttatcgtctgtgttccaaatccaccaattgacgagaagaatgccaccatgccagtcaccatgttgattcgggtaaaaaccagcgaggatgcagacgagttgcacaaaattttactggagaaaaaggatgcctgaacacgcaaagtcggctgcagaattattgccaagttgctgctgcttccaccgccccttaaagttagtcagtttttcttctcttctttgacattctaagaacttatagataacttaaaacttttgtgaggaagattaatgtggccaataaaacctttaaatgttaagtgtcaaaaaaaaaaaaaaaa

SEQ ID NO: 147 - DNA, 3262 bp, Homo sapiens
aggaaatggtttctggaaaacgttagtaaggtcagtttttaaacactgaatccaaggttgtcttctggaatatccaaattggttatgaccagaatgtgattcattatactaagctaaaggaatagattaaagaattagcaacagtggccgggtgcagtggctcatgcctgtaaccccagcactttgggggaggcccaggtgggtggatcatttgaggtcaggagtttgagaccagcctggccaacatggtgaaacctaaaaatacaaaaattagccaggtgtggtggcaggtgcttgtaatcccagctgcttgggaggctgaagcaggagaattgcttgaacccggaggcaggggttgcagtgagccaagatcacaccattgcactccagcctgggtggcagagtgagactctgtctcaaaaattaaaaagcaacagtgtatatgcaatagttgcaagatgtaagatcacccaaagagtatgcagagggaaatgagggacagaacccagaaatattaatacccagggagtgaacaggaggaggaccccaagaagttactgagtcagatttttcccactcatccaggtgaaagtttaggtcaataatgtgaaataccagagggattaaatgtctacagaaataaaaccatgtctcacattaagacaaacaagtaggttggagggatattttgaaaggcaaggtgatattaaactttattctgaaagtagtttgttagagaaagaggcatgataagagttgcagttaactgattggaaactatgcagcagatgaaactggaataaaggaaactcatcaggaaatgattatagtaataagggccagaaataagggcttgcttgcctgaactaaaaacaaagaggatacaaaggttctagaaatatttcaaaggaattagctttaattcagcaatactcattgagaatcacctatgcacctggctctgaagatgaagtgctgagtaaacttagacatggaccctgctatcatggagatggcagattattggtcagaatgctcttacctgtcattgtagcaattttgttagatccttaatacctctgaattgctaataaacttgttttggctgaaaaaatagtcctgtgaattttaccatgcagttaaataagaaactaaaagcaaacctaaataccaccaaaaaggttagtagtctgttatatgcattagccttaatctaaggaaatattttattataggtctccttgaagaaaatgatattttcaggaatgctcaagcaggtgttctcatcagcactaatagtcatccaatcttaaggaaaaacagaatatttgatggatttgccgcaggtattgaaattacaaatcacgcaactgcaacactagaaggcaatcagatttttaacaaccggtttggaggcttatttttagcatctggtgttaatgtgacaatgaaagataacaaaataatgaacaatcaagatgccatagaaaaggctgttagtagaggccaatgtttatataaaatatcaagttataccagctatcccatgcatgatttctacagatgtcatacttgtaacaccacagatcgaaatgccatatgtgtgaactgcattaagaagtgccatcagggacatgatgtagagtttattagacatgataggtatgtagcacacttgcttgatatattacccaattactttccccctcacttttctaatatttgggtttcattttgctttaggtttttctgtgactgtggtgctggaacactgtctaatccttgtacattagctggtgagcctacacatgatacagatacactatatgactctgctccacctatagaatctaatacattgcagcacaactgaattccttccctaaagaaaaagtcctgccattgtaacatcataacttaaaacacttttttggaagaagatttaaaatatttgcccatgctacaggaagagactgtattaaaaatggatacacaaggtcagttgacactatgaagctcaagctaccaaaaagaaagtggcaatatattgactcaggatctcaaagctgggtgttttagcattactgtgtaaagacttgaagggacagaagtgaagaaaataagctgcaattttgtacagataccaacttctgaaaagctggtgtttttacaactagcattgaatgcagtccaatttgcagtagtaatcttcaatagacaagcagctttgttgctgcctttatggacatgggtaccaattgcttttgtaatatggtaaaaatgtgagctagcacttctgcgttccttttgattttttttttttaacatgtattcagattgagaaatatgattttaatgccttaatctcatgtagtttgtttttaatttcaagcaaaatcttactgtacttgaatgtgccctgttttgttagcacacctagacttgctgtaactgtactcatgtcccagtatgtacgttctttctatgaaagagaaaacactaatcttaaattatatccagcaatgtttctggtatcctttaagaaaagttaagactattatttccttcccttccctgtgcagcattcaaaaatcacccctagaaaaagtgagtgttttaatgagacttcctaggaagggatgcactgtaaaacaaaagtattcttgtaactcagttttgtgaaaggtaaaaaactactatgttttaagtacactttagaaagtctcttcaaaacaaacagtcctgtatttgaactctgttcatagtttttttttgaacagtttagacaaaactgttggaaattaaaccaatttcctgcattaagctgagacaagtatataaacagccctatacagtttcatagcttttcctcccccatttatgtgtattggtgacagtgggtataaaacagcctgaaagtgtatgcatgtaccataacatttagacttaatatattgtggagtattcaataaccattatgtagaaggtagataagaattaaaagggtttaatttcctagaaagaaaatggaaaaatggtcatttttaaaaaataaagtttattagatcataatgttgtctgaatttaccacctttgtcagaagtcaactcaaagcttccaatgtagtcagtctataattccttaatcaaagtcagcaatttatggacagcttcagcatttacagttgacctttcactagccaggcaaacttcccttaaaattaaaaaaaaaaaaaaaaaaaaaaaaaaaaaaaaaaaaaaaa

SEQ ID NO: 148 - DNA, 739 bp, Homo sapiens
ggaacgggagcaggagattgaccgctggagggtgaagtgcgtgcaggaggtggaggaaaagaagcgggagggagaggaactcaaagcagctgctgatggggtactagctgaagtgaggaaaaaacaagcagataccaaaagaatggtggacattctacgggctttggagaaattgaggaaactgaggaaagaggctgcagcgaggaaaggggtctgtcctccagcctcagcggatgagacttttacgcatcatcttcagcgactgagaaaactcattaaaaagcgctctgaactgtatgaagctgaagagagagccctcagagttatgctagaaggagaacaagaggaagagaggaaaagagaattagaaaagaaacaaagaaaagaaaaagagaaaattttacttcagaaacgtgaaattgagtccaagttgtttggggatccagatgagttcccacttgctcacctcttggagcctttccggcagtattatctccaagccgagcactccctgccagcgctcatccagatcaggcatgattgggatcagtacctggtgccatccgatcatcccaaaggcaacttcgttccccaaggatgggtccttcccccgctccccagcaacgacatctgggcaactgctgttaagctgcattagtaaagatgctccaggagtgtggtccagccagcgctctttccagctgtaaatattagcgatggtgccatcttttgctgtaga

SEQ ID NO: 149 - DNA, 3231 bp, Homo sapiens
ctccagggacaggcagccaccatgagcctcagtgaggagcaggcccggagctttctggaccagaaccccgattttgcccgccagtactttgggaagaaactgagccctgagaatgttggccgcggctgcgaggacgggtgcccgccggactgcgacagcctccgggacctctgccaggtggaggagagcacggcgctgctggagctggtgcaggatatgcaggagagcatcaacatggagcgcgtggtcttcaaggtcctgcggcgcctctgcaccctcctgcaggccgaccgctgcagcctcttcatgtaccgccagcgcaacggcgtggccgagctggccaccaggcttttcagcgtgcagccggacagcgtcctggaggactgcctggtgccccccgactccgagatcgtcttcccactggacatcggggtcgtgggccacgtggctcagaccaaaaagatggtgaacgtcgaggacgtggccgagtgccctcacttcagctcatttgctgacgagctcactgactacaagacaaagaatatgctggccacacccatcatgaatggcaaagacgtcgtggcggtgatcatggcagtgaacaagctcaacggcccattcttcaccagcgaagacgaagatgtgttcttgaagtacctgaattttgccacgttgtacctgaagatctatcacctgagctacctccacaactgcgagacgcgccgcggccaggtgctgctgtggtcggccaacaaggtgtttgaggagctgacggacatcgagaggcagttccacaaggccttctacacggtgcgggcctacctcaactgcgagcggtactccgtgggcctcctggacatgaccaaggagaaggaattttttgacgtgtggtctgtgctgatgggagagtcccagccgtactcgggcccacgcacgcctgatggccgggaaattgtcttctacaaagtgatcgactacatcctccacggcaaggaggagatcaaggtcattcccacaccctcagccgatcactgggccctggccagcggccttccaagctacgtggcagaaagcggctttatttgtaacatcatgaatgcttccgctgacgaaatgttcaaatttcaggaaggggccctggacgactccgggtggctcatcaagaatgtgctgtccatgcccatcgtcaacaagaaggaggagattgtgggagtcgccacattttacaacaggaaagacgggaagccctttgacgaacaggacgaggttctcatggagtccctgacacagttcctgggctggtcagtgatgaacaccgacacctacgacaagatgaacaagctggagaaccgcaaggacatcgcacaggacatggtcctttaccacgtgaagtgcgacagggacgagatccagctcatcctgccaaccagagcgcgcctggggaaggagcctgctgactgcgatgaggacgagctgggcgaaatcctgaaggaggagctgccagggcccaccacatttgacatctacgaattccacttctctgacctggagtgcaccgaactggacctggtcaaatgtggcatccagatgtactacgagctgggcgtggtccgaaagttccagatcccccaggaggtcctggtgcggttcctgttctccatcagcaaagggtaccggagaatcacctaccacaactggcgccacggcttcaacgtggcccagacgatgttcacgctgctcatgaccggcaaactgaagagctactacacggacctggaggccttcgccatggtgacagccggcctgtgccatgacatcgaccaccgcggcaccaacaacctgtaccagatgaagtcccagaaccccttggctaagctccacggctcctcgattttggagcggcaccacctggagtttgggaagttcctgctctcggaggagaccctgaacatctaccagaacctgaaccggcggcagcacgagcacgtgatccacctgatggacatcgccatcatcgccacggacctggccctgtacttcaagaagagagcgatgtttcagaagatcgtggatgagtccaagaactaccaggacaagaagagctgggtggagtacctgtccctggagacgacccggaaggagatcgtcatggccatgatgatgacagcctgcgacctgtctgccatcaccaagccctgggaagtccagagcaaggtcgcacttctcgtggctgctgagttctgggagcaaggtgacttggaaaggacagtcttggatcagcagcccattcctatgatggaccggaacaaggcggccgagctccccaagctgcaagtgggcttcatcgacttcgtgtgcacattcgtgtacaaggagttctctcgtttccacgaagagatcctgcccatgttcgaccgactgcagaacaataggaaagagtggaaggcgctggctgatgagtatgaggccaaagtgaaggctctggaggagaaggaggaggaggagagggtggcagccaagaaagtaggcacagaaatttgcaatggcggcccagcacccaagtcttcaacctgctgtatcctgtgagcactggtcccgtggggaccctatggctccctcaatcttcacccactaggatttgggttctgcctgtggctatttgctacaagaggttaggaagcccaagaaaatgactgaagatcattctggatattttaattttttttttttttttttttttgagatggagtcttgctctgtcacccaggctggagtgccgtggcacgatctcagctcactgcaacctccacctcccaggttcaagcgattctcgtgcctcagcctcctgagtagctgggactacaggcgcccaccaccacacatgctaatttttgtattttcagtacagatggggtttcaccatattgggcaggctggtctcgaactcctgacctcaggtgatcaccgcctcagcttcctgaagtgctgggattacaggcatgagccaccacgcccagcctgtttttataaactgaagccaactgtgaataaactgtagcctacattactcatccatttttggatagttaccactgggagacctttgaaaagggtccatgaactctgaaatcactgagaacatttgcagccacacatgtacatatgtgtacacaggtagacagatggacacaggccgtttctcatccagtttaggaaaacacacatgctcag

SEQ ID NO: 150 - DNA, 2165 bp, Homo sapiens
ggcacgagggtgcagccacctccgagagcctggatgtgatggcgtcacagaagagaccctcccagaggcacggatccaagtacctggccacagcaagtaccatggaccatgccaggcatggcttcctcccaaggcacagagacacgggcatccttgactccatcgggcgcttctttggcggtgacaggggtgcgcccaagcggggctctggcaaggactcacaccacccggcaagaactgctcactacggctccctgccccagaagtcacacggccggacccaagatgaaaaccccgtagtccacttcttcaagaacattgtgacgcctcgcacaccacccccgtcgcagggaaaggggagaggactgtccctgagcagatttagctggggggccgaaggccagagaccaggatttggctacggaggcagagcgtccgactataaatcggctcacaagggattcaagggagtcgatgcccagggcacgctttccaaaatttttaagctgggaggaagagatagtcgctctggatcacccatggctagacgctgaaaacccacctggttccggaatcctgtcctcagcttcttaatataactgccttaaaactttaatcccacttgcccctgttacctaattagagcagatgacccctcccctaatgcctgcggagttgtgcacgtagtagggtcaggccacggcagcctaccggcaatttccggccaacagttaaatgagaacatgaaaacagaaaacggttaaaactgtccctttctgtgtgaagatcacgttccttcccccgcaatgtgcccccagacgcacgtgggtcttcagggggccaggtgcacagacgtccctccacgttcacccctccacccttggactttcttttcgccgtggctgcggcacccttgcgcttttgctggtcactgccatggaggcacacagctgcagagacagagaggacgtgggcggcagagaggactgttgacatccaagcttcctttgtttttttttcctgtccttctctcacctcctaaagtagacttcatttttcctaacaggattagacagtcaaggagtggcttactacatgtgggagcttttggtatgtgacatgcgggctgggcagctgttagagtccaacgtggggcagcacagagagggggccacctccccaggccgtggctgcccacacaccccaattagctgaattcgcgtgtggcagagggaggaaaaggaggcaaacgtgggctgggcaatggcctcacataggaaacagggtcttcctggagatttggtgatggagatgtcaagcaggtggcctctggacgtcaccgttgccctgcatggtggccccagagcagcctctatgaacaacctcgtttccaaaccacagcccacagccggagagtccaggaagacttgcgcactcagagcagaagggtaggagtcctctagacagcctcgcagccgcgccagacgcccatagacactggctgtgaccgggcgtgctggcagcggcagtgcacagtggccagcactaaccctccctgagaagataaccggctcattcacttcctcccagaagacgcgtggtagcgagtaggcacaggcgtgcacctgctcccgaattactcaccgagacacacgggctgagcagacggcgccgtggatggagacaaagagctcttctgaccatatccttcttaacacccgctggcatctcctttcgcgcctccctccctaacctactgacccaccttttgattttagcgcacctgtgattgataggccttccaaagagtcccacgctggcatcaccctccccgaggacggagatgaggagtagtcagcgtgatgccaaaacgcgtcttcttaatccaattctaattctgaatgtttcgtgtgggcttaataccatgtctattaatatatagcctcgatgatgagagagttacaaagaacaaaactccagacacaaacctccaaatttttcagcagaagcactctgcgtcgctgagctgaggtcggctctgcgatccatacgtggccgcacccacacagcacgtgctgtgacgatggctgaacggaaagtgtacactgttcctgaatattgaaataaaacaataaacttttaatggtaaaaaaaaaaaaaaaaaa

SEQ ID NO: 151 - DNA, 3135 bp, Homo sapiens
tgtggggagtgctttgctcatagctctgacctcactgagcaccagaagattcatgatagggagaagccctctggaagcagaaactatgaatggtctgtcattcgcagcttggcccctactgaccctcaaacaagttacgcccaagagcagtatgctaaagagcaagcgcggaacaaatgtaaggacttcagacaattttttgctaccagcgaagacctcaacacaaaccagaaaatctatgaccaagagaagtctcatggcgaggagtctcaaggcgagaatactgatggggaggagacccacagcgaggagacccatggtcaggagacaattgaagaccctgtcattcaaggctcagacatggaagaccctcagaaggatgaccctgatgacaaaatctatgaatgtgaggactgtggcctgggctttgtggatctcacagacctcacagaccatcagaaagtccacagcaggaagtgcctggttgacagtcgggagtacacacattctgtaattcacacccattccatcagcgagtatcagagagattacactggagagcagctgtatgaatgtccaaagtgtggggaatcttttattcatagctcattccttttcgagcatcagagaatccatgaacaagaccagttgtattccatgaaggggtgtgatgatggttttattgccctcttgcccatgaagccacggaggaatcgtgctgcagagaggaatcctgctcttgctgggtcggccattcgatgccttttgtgtggacaaggcttcattcatagctctgcccttaatgagcatatgagacttcatagggaagatgatttactggagcagagccagatggctgaggaagctatcattccaggcttagccctcactgagtttcagagaagtcagaccgaagagagactctttgaatgtgcagtctgtggagaatctttcgtcaacccagcagaacttgcagatcacgtaactgttcataagaatgagccctatgagtacgggtcctcctatactcacacctcatttcttactgagcccctcaaaggagctataccattctatgaatgcaaggattgtggtaagtcctttattcatagcacagtcctcactaaacataaggagcttcatctggaagaagaagaagaagatgaagcagcagcagctgcagcagcagcagcccaggaagttgaagccaatgtccatgttccacaagtagttctgaggattcagggcttaaacgtagaggctgctgagccagaagtggaggctgccgagccagaagtggaggctgctgagccagaagtggaggctgctgaaccaaacggagaggctgaagggccagatggagaggctgcagagcccattggagaggctggacagccaaatggagaggccgagcagccaaatggggatgctgatgagccagatggtgcaggtattgaagacccagaagaaagagctgaagagccagagggaaaagctgaagagccagagggagatgccgacgagcctgacggtgtgggaattgaagacccagaagaaggtgaagatcaagagattcaggtagaagaaccatactatgactgccatgaatgcacagaaaccttcacttccagcacagcattcagtgaacacctgaaaactcatgccagcatgatcatatttgagcctgcaaatgcctttggggagtgctcaggctacatcgaacgtgccagcaccagcacaggtggtgccaatcaagctgatgagaagtacttcaaatgtgacgtctgtgggcagctcttcaatgaccgcctgtccctcgccagacaccagaatacccacactggctgagggcatggggtaaaggttagaaaaccttcacctaggacttgacccttaccaaaccacagagaatccaaaccaatccatgataatgtcagtaggagacttaaccttagtgtgttacacacctgacttaacatctctaaactcagattgaaaagagaccgaatgtgcagattccacagtcttaagctttccccttcagatgtcagtgtctgcatgtgggaaagccatagcacacatcttacctttccaagtaatcagattgagaaaaccctatgagtattccagactacagagtttgcccaaatgcaactgtaaatgcacacttgtgtgaacgtatgatatagtgtttcatgaggtgtatataaaatagcaaattatgacagaacagtgatcacatatatttggatttatatgatatacagttacagtttactctgcagaggtaccttacctggtattctttgaattttttttttttttggaggaggaagagagcaacaaatttggattatatttttaaagtgtcttagatcctgagaaagatttattgtgcattatttgaaccctgtcaataatctttttgagtaattgttttgtttcttacccttaaatagtcttgtgaagctgtaggcatgatagataacatggcttttactccttactgtttgaaaagataagtactttagcttctttctgcagccatttcatctgcaccaacactttggaacctaatactgtgtaaggctttacaatatacggattggctttttgtgacccagattgattggttgccacatgttatgtttgttgaagtggttctcatgcaaaaatattacacatttgtgttctgggtttttttttttttttaaccaactcaatatgtgtttgatgatagtgaattgataaaacccgaagcttttccctgtaaatcttacatctttgcctttaaagaatgggttacaaccatcactagatcacagtagtgcctaatgaaggttgagaaccgtaggagaggctctcatgctgtaaataatgttgcaggctaataacctttcatcacttcctttgtgcgcttcctgccttaagtgacaagtagcaacatggcttgggtcccctgtgcagcatcagcttatgctgccacaagtcagtttgcaccctaggtgcccaggagctagtatccttagatctttctatcgctaacttaattctcttcgttatttatctgaccctctaactccatgtctaacttgcattaaaaaaaaaaaaattctttacagtcaacccaagctt

SEQ ID NO: 152 - DNA, 1219 bp, Homo sapiens
gagaacatccatctacagtcctcctttgcttggtggattgggctcagaggaacaaaaagttagtctgactctgtgcatattagcatcatgtctttagagaaaggtcagcctctctggttgccaaatactcatcatgatgctcatgacttaaaggttctgaggagccttgtctcccttggatttttgagtcagggtacaggaaaaaacattgctgactaactaactgcaaatgcatctgcaggtgaaaccctacgaaagcacagttctggctataaacttcagagttctctgtaaaaaacttagagcactagaagcacaggaatagtgagtgtacagcttatgcggttgtagaggggcaactgatgaacacaggtcccacatatatgagggagtatgacgttctctacctaatatgttctgtgtgcatgttttgaatgattgaagatgggattaactaatgcaagtttacagttgcctcctaaaacacacattctgtataattatcgctaaatacaatgctgtgaggtctatagttcctgtaacccctttctcctccccaaggacagagaagaactagccatgtgctatagggaaccctgagtgccctactcttttcccaagaagggtaaagcctacaatatcatcagggggcatgaagcacattaatttgcagtggctgcttcatatgaggaggtatggtggacaggctaatttttccttgaaaatgtggcttcttcaactcctttcaaatttaggatggaatacttcctgaaataaaactgggctttatgcaggattctctttgaaaattcttgtatgtccagaacaaaagataaaactaattgtattcctcacattcacaatccccattggtctgaagtcacgtagcacagagcatctatagcacatagtgtttaaagactaatgaatgcaaaaagataaaatcttcaactaatttttgaattgtttctcatatatgctactagaaaatgccttgttgatgaagcacattttgggtagttgaggtcttttgttttcgcctttagctttctaagctttcttacaatgtggactgattactgtaacatttcacgtgtaaaataactggatattctttatatactggaaataacctgtgaatccaatatttcactaagtgttttaacttttgtgtatatatctctcatcaataaatgtggatttcaaaaaaaaaaaaaaa

SEQ ID NO: 153 - DNA, 5147 bp, Homo sapiens
aggcagcagcagagggagagctcggggcttggaggggaaacagcggaagacctaagattatcgggagggcagcagaggcagagaacgaggacaggacccttggccgtcttcttccagggaacgagaggtcacagcctcgctctccgcttatgcttctggcgccccagcttaaagccgaggctgcggctgacaaagggctcgcgccggtgccgccgcccttctcatccgggcattcgggtccctgcgagaaggagggggaaggacagagggggaggggaaggagccggaggggcgcacacttggagctgaagccctctccagggctccgggccggtgccccaacggacagaggtcgaggaggacccgcagaggtggcagcggccgggggcaggaggatggtgcagaaggagagtcaagcgacgttggaggagcgggagagcgagctcagctccaaccctgccgcctctgcgggggcatcgctggagccgccggcagctccggcacccggagaagacaaccccgccggggctgggggagcggcggtggccggggctgcaggaggggctcggcggttcctctgcggtgtggtggaaggattttatggaagaccttgggttatggaacagagaaaagaactctttagaaggctccagaaatgggaattaaatacatacttgtatgccccaaaagatgactacaaacataggatgttttggcgagagatgtattcagtggaggaagctgagcaacttatgactctcatctctgctgcacgagaatatgagatagagttcatctatgcgatctcacctggattggatatcactttttctaaccccaaggaagtatccacattgaaacgtaaattggaccaggtttctcagtttgggtgcagatcatttgctttgctttttgatgatatagaccataatatgtgtgcagcagacaaagaggtattcagttcttttgctcatgcccaagtctccatcacaaatgaaatctatcagtacctaggagagccagaaactttcctcttctgtcccacagaatactgtggcactttctgttatccaaatgtgtctcagtctccatatttaaggactgtgggtgaaaagcttctacctggaattgaagtgctttggacaggtcccaaagttgtttctaaagaaattccagtagagtccatcgaagaggtttctaagattattaagagagctccagtaatctgggataacattcatgctaatgattatgatcagaagagactgtttctgggcccgtacaaaggaagatccacagaactcatcccacggttaaaaggagtcctcactaatccaaattgtgaatttgaagccaactacgttgctatccacacccttgccacctggtacaaatcaaacatgaatggagtgagaaaagatgtagtgatgactgacagtgaagatagtactgtgtccatccagataaaattagaaaatgaaggcagtgatgaagatattgaaactgatgtactctatagtccacagatggctctaaagctagcattaacagaatggttgcaagagtttggtgtgcctcatcaatacagcagtaggcaagttgcacacagtggagctaaagcaagtgtagttgatgggactcctttagttgcagcaccctctttaaatgccacaaccgtagtaacaacagtttatcaggagcccattatgagccagggagcagccttgagtggtgagcctactactctgaccaaggaagaagaaaagaaacagcctgatgaagaacccatggacatggtggtggaaaaacaagaagaaacggaccacaagaatgacaatcaaatactgagtgaaattgttgaagcgaaaatggcagaggaattgaaaccaatggacactgataaagagagcatagctgaatcaaaatccccagagatgtccatgcaagaagattgtattagtgacattgcccccatgcaaactgatgaacagacaaacaaggagcagtttgtgccaggtccaaatgaaaagcctttgtacactgcggaaccagtgaccctggaggatttgcagttacttgctgatctattctaccttccttacgagcatggacccaaaggagcacagatgttacgggaatttcaatggcttcgagcaaatagtagtgttgtcagtgtcaattgcaaaggaaaagactctgaaaaaattgaagaatggcggtcacgagcagccaagtttgaagagatgtgtggactagtgatgggaatgttcactcggctctccaattgtgccaacaggacaattctttatgacatgtactcctatgtttgggatatcaagagtataatgtctatggtgaagtcttttgtacagtggttagggtgtcgtagtcattcttcagcacaattcttaattggagaccaagaaccctgggcctttagaggtggtctagcaggagagttccagcgtttgctgccaattgatggggcaaatgatctcttttttcagccacctccactgactcctacctccaaagtttatactatcagaccttattttcctaaggatgaggcatccgtgtacaagatttgcagagaaatgtatgacgatggagtgggtttaccctttcaaagtcagcctgatcttattggagacaagttagtaggagggctgctttccctcagcctggattactgctttgtcctagaagatgaagatggcatatgtggttatgccttgggcactgtagatgtgaccccctttattaaaaaatgtaaaatttcctggatccccttcatgcaggagaagtataccaagccaaatggtgacaaggaactctctgaggctgagaaaataatgttgagtttccatgaagaacaggaagtactgccagaaactttccttgctaatttcccttctctgataaagatggacattcacaaaaaagtaactgacccaagtgtggccaaaagcatgatggcttgcctcctgtcttcactgaaggctaatggctcccggggagctttctgtgaagtgagaccagatgataaaagaattctggaattttacagcaagttaggatgttttgaaattgcaaaaatggaaggatttccaaaggatgtggttatacttggtcggagcctgtgacatttgttgacactgtgaactgtccaaaagtctcttaactgcaccttgtgaatggtagttgaggtcttcatacagttcagcctctagaatggtaacaaatcagccaattggattcgaaacaaagaagactatgtaaaactcacccatcacactttgagactactcactggttggaagaatatagtattgcagcaaatcctgtatgaaagagagatgtgggcttcctttttgagtcttgtgttaggtgctgagaccttttacatgggcttatacagggagagagtcttcaataaatgtagtcagcactattttctgcatccagtgtggttgcgtttctcacctgagagtaatcaagataacatctgtcatcttccttggtttattgagtgaaatgcctctcagtcttaggggacatggcagagatgaaagaaagaaagagtgggtttcagaagtgtcagggtggagtgattccaagtgggatggttgtggcattagtttaagctgaataaataatttcaatttggggcagttattctgctttttgtaaagccgtggccaattgtctcctgtaatgactgttggttcaggcatgttgtactttgtagggacaaatgtgcatttgtttgtggcaaaagcctacaattgacaaacttgtaaatttctttgtatataaactagctgtaacctgactatcctttgtgtttactgtttttgtaaatttttttcctctataaatgaaagggtgttggttcagaatggcactttgaataatgtaaaccagtgaaaagtggattttctttacttttgtctttgggtttggggttgtttttgttctttttgaagttttattatttttaaagtgcctcccacctaggcgtaggccatgaccatttggggtacgagagcctaattttgtaggacttaatctgttgaaaagtgcagttacttctggaaattaacctcaatattaggtcagcatgtgaaatgttggatttgacatgtcaggtagggttcagggactgattggtcccatttgccctcaggtcagttgtttaatctcaagacctgttactactgattttattaaatcagagtctttaattcttgcatgtttgtatctaatttctgaacgaatgagcacactttaaccagttatttacagttacctttttcctttaaccggattgtgaaagcttcatgtattttaatttagattctgtgtttttaagggttctgagcatgaagctggcagatagtcggcaggactcattttttcatcatggctggctgatttctccatagattgataacagtattttgttatcttgcttctctgtagttttgcatcagctgtttaactttgagctgagtgaggggagaggggtaaagagaaagaaacttaagttttctttcacagaactccaccattgtgggctttgagagagccctaaagcattgtacctagtggtacctagtgacttccaaccaaagcctttgagtatgcactaaataggtgagaagaaaggagagaaggtttttaggttagaaacctttaaccgatagaaggatatggtatgttgtaaagctggaaccaagtttgcatttttgagggcttgagatgaagggaagactcttaccagatagtaagacagctgagttttcctcagttttctcgtcttaacactagtggacaattctagcattttgtttggaggatttcagagttaacctcatggaattcaggattttttagcaagtttgcttttggttttatcttggcttttagtaatcatgttggctggtctggtcacaggtgactgtgaaacagatgcccctggtcttgctttcatcactctaggatcatgaagtgctatgctatttcctggttatgaatattaaggttggaattacatttttattgattgtttggatcagagctcagttcctgtagaaaacgaactgtaaaagaccatgcaagaggcaaaataaaacttgaagtgg

SEQ ID NO: 154 - DNA, 279 bp, Homo sapiens
gcctttgatatagacttgcattattagaaggatataacatcttttttaagtgtgcattttctttcagttaaccaaattaaacagatgtgcagttttattaaaaatatagacctagtgtttcatgttggaacaataaatattgcatgtgagtagtatttcttgttttttgaatacagtatatattgataaattgtttatgttggaatgaagttagaaactatatagcaaaacattatattttaagtgtttatttttcccacctttaaataaaaatgtttc

SEQ ID NO: 155 - DNA, 2109 bp, Homo sapiens
atgccgatcaataaatcagagaagccagaaagctgcgataatgtgaaggttgttgttaggtgccggcccctcaatgagagagagaaatcaatgtgctacaaacaggctgtcagtgtggatgagatgaggggaactatcactgtacataagactgattcttccaatgaacctccaaagacatttacttttgatactgtttttggaccagagagtaaacaacttgatgtttataacttaactgcaagacctattattgattctgtacttgaaggctacaatgggactatttttgcatatggacaaaccggaacaggcaaaacttttaccatggaaggtgttcgagctattcctgaacttagaggaataattcccaattcatttgctcacatatttggtcatattgcaaaagcggagggtgatacaaggtttttggttcgagtgtcttatttggaaatatataatgaagaagttcgtgaccttttgggcaaggatcagacacaaaggttagcggttaaagaaagacctgatgtgggagtttatatcaaagatttatcagcttatgtggtaaataatgctgatgatatggatagaattatgacgctaggccacaaaaatcgttctgttggtgcaactaatatgaacgaacatagttcccgttcccatgccatctttacaattactatagaatgcagtgaaaaaggcattgatggtaacatgcatgtcaggatggggaagctccatcttgtagatcttgctggttcagaaagacaggcaaaaactggagctactggacagcgcctaaaggaagctacaaaaatcaatctttcactttccacccttggtaatgtaatttctgccttggttgatggaaaaagcactcatgtgccttatcgtaactctaaactgactcgtcttcttcaggattccttaggaggaaattcaaaaaccatgatgtgtgcaaatattgggccagcagattacaattatgatgaaactatcagtacattacggtatgccaatcgtgctaagaatattaaaaataaagctagaattaatgaagatccaaaggatgctttgctgcgtcagttccagaaagaaatagaagaactgaaaaagaagcttgaagaaggtgaagaaatatcaggctctgatatcagtgggtcagaggaagatgatgatgaagagggtgaggttggagaagatggagagaaaaggaaaaaaagaaggattcaaataggaaaaaagaaagtctccccagacaagatgattgaaatgcaagcaaaaattgatgaggagagaaaagcacttgaaacaaagctcgacatggaagaagaagaaagaaacaaggctagagctgaattagagaaacgggaaaaagatcttcttaaagcccagcaagagcatcagtctttgctggaaaaattatctgccctggaaaagaaggtaattgttggtggggttgacttgttggccaaagctgaggaacaagagaaacttcttgaagaatctaacatggaactggaagaaaggaggaaaagagcagagcaacttcgcagagaacttgaggaaaaagagcaagaacgcttggatattgaagaaaaatataccagtttgcaagaggaagcacagggaaagaccaagaagttaaagaaagtttggactatgctgatggctgcaaagtcagagatggctgatctccaacaagaacatcagagggaaattgaaggcctactggagaacattcggcaacttagccgggagcttcgacttcagatgcttattattgataactttatacctcgggattatcaggaaatgattgaaaactatgtccattggaatgaagacataggagaatggcagctaaaatgtgttgcttatacaggaaataacatgaggaagcaaaccccagtacctgataaaaaggagaaagatccctttgaggtggacctttctcacgtgtatcttgcctatactgaggagagtctgcgtcagtctttgatgaaactagaaagaccacgaacttcaaaggggaaagcaaggccaaagacagggagaaggaagcgttctgcaaagcctgaaactgtaattgactctttactgcagtaa

SEQ ID NO: 156 - DNA, 1160 bp, Homo sapiens
ggcacgaggctgttccacacccagaagacgtcaggtgacttcagtcctgctgcagttgtgcagcagaggagactgcagacttcggttgaggaaacgggtatttcatgtctcagggagtaggtttgtgcagttacagcttttctgttggtatgcataattaataattggagctgcaaagcagatcgtgacaagagatggacggtcagaagaaaaattggaaggacaaggttgttgacctcctgtactggagagacattaagaagactggagtggtgtttggtgccagcctattcctgctgctttcattgacagtattcagcattgtgagcgtaacagcctacattgccttggccctgctctctgtgaccatcagctttaggatatacaagggtgtgatccaagctatccagaaatcagatgaaggccacccattcagggcatatctggaatctgaagttgctatatctgaggagttggttcagaagtacagtaattctgctcttggtcatgtgaactgcacgataaaggaactcaggcgcctcttcttagttgatgatttagttgattctctgaagtttgcagtgttgatgtgggtatttacctatgttggtgccttgtttaatggtctgacactactgattttggctctcatttcactcttcagtgttcctgttatttatgaacggcatcaggcacagatagatcattatctaggacttgcaaataagaatgttaaagatgctatggctaaaatccaagcaaaaatccctggattgaagcgcaaagctgaatgaaaacgcccaaaataattagtaggagttcatctttaaaggggatattcatttgattatacgggggagggtcagggaagaacgaaccttgacgttgcagtgcagtttcacagatcgttgttagatctttatttttagccatgcactgttgtgaggaaaaattacctgtcttgactgccatgtgttcatcatcttaagtattgtaagctgctatgtatggatttaaaccgtaatcatatctttttcctatctatctgaggcactggtggaataaaaaacctgtatattttactttgttgcagatagtcttgccgcatcttggcaagttgcagagatggtggagctagaaaaaaaaaaaaaaaaaaaaaa

SEQ ID NO: 157 - DNA, 1090 bp, Homo sapiens
gctccgggagacttccggcagggcgggcgcggggtcttggcgaacggtcttcggaagcggcggcggcgcgatgaccacgctacgggcctttacctgcgacgacctgttccgcttcaacaacattaacttggatccacttacagaaacttatgggattcctttctacctacaatacctcgcccactggccagagtatttcattgttgcagaggcacctggtggagaattaatgggttatattatgggtaaagcagaaggctcagtagctagggaagaatggcacgggcacgtcacagctctgtctgttgccccagaatttcgacgccttggtttggctgctaaacttatggagttactagaggagatttcagaaagaaagggtggattttttgtggatctctttgtaagagtatctaaccaagttgcagttaacatgtacaagcagttgggctacagtgtatataggacggtcatagagtactattcggccagcaacggggagcctgatgaggacgcttatgatatgaggaaagcactttccagggatactgagaagaaatccatcataccattacctcatcctgtgaggcctgaagacattgaataaccctgggcagtggttcttaggcagatactctagatgctttatggacaatattattttcattggatgattctggagctctattaggagaaaagtaatcattttaggtcttaaagacttcaagaaaatacaggttatcaatttattttaaatctcattgtttccagttagcaatatcatacctattaaagctgttcattgtaacaaaattcaatcaaaaaggcagctaggtcagaaggaaacataccactctcatggttcatagtattcactgtatgtatgctagggaaaagacttgctccagtctcctcctcagttctgtgcctgagaaccactgctgcatatatttgtttttaaattttgtattgaactgttaattgaagctttaaaagcatatatgaaatgtataaatctaagatgtataatacattattgactctaaaaaaaaaaaaaaaaaaaaaaaaaaaaaaaaaaaaaaaaaaaaaa

SEQ ID NO: 158 - DNA, 2666 bp, Homo sapiens
gtttcctcaggggtaccagttcccctccatggagcagctggctgccatgctccccagcgtggtgcagcatttcgggttcaagtatgtgattggcatcggagtgggcgccggagcctatgtgctggccaagtttgcactcatcttccccgacctggtggaggggctggtgctggtgaacatcgaccccaatggcaaaggctggatagactgggctgccaccaagctctccggcctaactagcactttacccgacacggtgctctcccacctcttcagccaggaggagctggtgaacaacacagagttggtgcagagctaccggcagcagattgggaacgtggtgaaccaggccaacctgcagctcttctggaacatgtacaacagccgcagagacctggacattaaccggcctggaacggtgcccaatgccaagacgctccgctgccccgtgatgctggtggttggggataatgcacccgctgaggacggggtggtggagtgcaactccaaactggacccgaccactacaaccttcctgaagatggcagactctggagggctgccccaggtcacacagccagggaagctgactgaagccttcaaatacttcctgcaaggcatgggctacattgcgtacttgaaggaccgaaggctgagtggaggagcagtgccctcagccagcatgacccgcctggcacgctcccgcactgcatccctcaccagtgccagctcggtggatggcagccgcccacaggcctgcacccactcggagagcagcgaggggctgggccaggtcaaccacaccatggaggtgtcctgttgaagcccttgatcccgctgacgacgcccacgtcgaggccccaccgccatccttgcgccggctcatgttccctttagtttatttttgtgagggcaaaggggaggaaatggggttctgtttgaaaaaaatgaggggatcttagatgctgcagcagaacagtctccaggtgttttaaggggctcagtcctcctcatcccatctcactctccgtggtaacttagccaacttgacccctctcatcccactcccggcggcccaggcacagaagggcagggccatagggagggagattcgctacggatccaggtcattcctgggtgagcccttgggcaggcatgtttggagatgagagaggcttcgagagggtgggtgctgggccacaggggtgcggggccagctcaggcactggcgtgggagccctgggagaccccttcccccaccctccaccaagcacacctgtttctgtctcatagcacatgtgacaatcatctggacaacagccacaagggggcgctcggaccaggcagccactttcctggtgctctctgggcccagctggtgctgtagggccacgcaggcaggggcgtcaaggggtttctctgcccaaggaagacagaacatggagaaccgtcagggcaggaaccccacagactgtcccttccagcccacactctgccacctcctggccctgtcccaattctgagccaaggcctccccgaggcagaagttgcctggtcctctgtccccacagtgacctgactgggggtgagggagaaggaggagagagcccatgtgtggtgtgtgtgcccctgagaactttgtggtgactgcctttgggagcccgcaggtggccagaggcaggggtagctgagttcctggagaccccttttttgcccccaggttccccagagggcaacgccatcagtagcagtgtggtgtttcaggcagagctctggccaggctgtgccagtgtgtcccggacgcatcactaaggaagagagagtttatttagtcaactggcccaaggcagcgaggcttctacagtcccacaccccatagccgcctgggctggggcttactgggggctgaaggttctggacatgaacaagggtcaggtagaagagaaaggcttcccctacaccccagcctcctgctgtcccctgaagcccaggactgcgttgtatgctttccatccactcaccttaccccatagcatcttgcggcccagaaaccagagccatttgtctcagaccctaaatcaataatcacaaaccccaaaacgggagagagcagtgaaaacatgcagggctgtggacgggggaagggttgtggcgggtgttctgaggctgagaggacacctatatgcgtatttcctctacacacatcaccccccttctataatcttaagccatgactagcctggtggcgtgttagtttctgcccagttctaccccctcatgtgcttcttctgaatactgaatgtgactgtttgaaagctggtagaattcatccctcttactgtagataacactgcaaatcttggaattttgttttttgctgtttccagatgtatctataaatatctatacattatatgtgtgtgtgtgtgtgtgtgtgtgtgtgtgtgtgtacatcgggtcctcccatgtgtggtgttcttctggaggttgtctctttggtcaaggtgaacttttaatgtttattattttcttctccgcacaaagtaaagagcctaattttgtgtattctggtggctgctgtcatgagatgataaaatgtaaaacaaaactctagtcaacgtagaaagagttaactgtgctgaaaaactaataaagaacctaagaag

SEQ ID NO: 159 - DNA, 2011 bp, Homo sapiens
tcgatttttcacagcctcagcctaggaaaaatggttcatgggataaacagctggtatttgtatctaaaactcagattggtcacataaatgccacggcattccgaagttttgattttgattaacattgacaggattactgtgtgtttaattttttaaaaactgaacactgtgattatggggttttgtaatttagcagaactcttactggtagaaaaaatagacctgaattatgtgtaactttttggaaggtttaatctgatatcaaaataatcattgaaatacaattccattgtaaagttgtacagaaagttatagagattatattgtgatgctggaacttggagtgagacacacatcatttggcatttgagttgaatggtaattcacagtaatgctgccgttgttcgggacttaaagacacttgacctgtttgggctgttgccacttaaaagttcatgaccacaaatgtccacagtgtcttcctctgaggaaactcgaatcctgaaatggaaattctttgtggcagataactggcttatgacaccttgaaaagttcaagtgctcatataacacaccacactgaaccccctttcctacagcaatatgttcactatgttaccaatttgcaacttgtgcttcaatagtggaatctactttcattgttaacactgagctaaagaaaaaaagccgtgtgttttatgaatgaccttatctgtttcctggataatacctttaagaataatgtcctgagtcaggcgtggtggtgcgtgcatctagtcccaactatttgggaggctgaggcaggaggatcgcttgagcccaggagtttaaagctgcagtgccctgtggttgcacctgtgaataactgcactccagcctgggcaacatagcgagacctcatctccaaaaaagaaaacaaaaaacaaaaaaaggaatgatgttctgtagagatggcctttcacttgaggagtactcagttttcaggttcttcctagctcggggcttttaaattttgaaatctaaacattctttcccaccatcctttttgactgttgaccttggttttctcttctaagtttctgtccctctgcttccttactttttttcctttttgaattctatctttatctgtcttttgttcactttttaatgctatatatgggcaggggtgagagacattactgagcaccttggtgagcaagcctggctttaaagattggagaagagcttctggcaccagaaccctgtcttcctccagttctcaacacggtgttgctcttcagtcataccggaatctgaatcaaaaaagtatttttaaatatccatgatttctccctgtattgaggttagccctgatcatgcttttttgtgccttgtaacccaggtcttcccaagtgcactcatccaggtccagtgctcagatgtgtttaaggagaccctatattcagggaagttgcgtgaacactgcagtggggagaattgagaatagtcaggcctatcagtctcacagaatcacccctctacctttgatattccacttagctgtagagtccatctgtttgtccatctgctgaaatgagaaaagaaaaatttatgcactgatttaaaacaaaccaaaaaaaaagaaaaaaacaaaaaaaaaatccctcctttctagctgaacaaaaatgtgcagttaatacttggcgcttgaaaatgcagtagtgaatgtggaaccaagcctgtctgtatatctggtagctccctttcttgctttgttttttcttaccagtattctgcctaacgtttgcttctgtgatggttatattgcctagcaagcacacccgtggttgtgaaaatagtatagcaaaaaagaaaaatccccggttattgatgtactagatttgtgtatgtcttttaaacagttctagtttcaccttacacagaataatcaggaaaagtgtaaaaattcaaaagtgaaataaaaattttatcagataaaaaaaaaaaaaaaaaaaaaaaaaaaaaaaaa

SEQ ID NO: 160 - DNA, 3337 bp, Homo sapiens
ccagggccggtgtctccaggagagggccgagcgcacagcagctctaggacctcgcaggcgcctcggcgcggcactcacgtagagcccaaggagcagtccccgacctctcctcggagggccgtgcaggcttccccggcggtccctacctgcgcctccgcccgccagcggcgctggggaaggggaggagcggcccggacgctgcccgccgcgcgcagggagccgcccgccgcaggccttgccgccgcccgcccgcgctctccccgcgagccccggagggcgggtctgcggccgagccagcggcggcggaggggcagcgcagacctctgcggcccgggcgggcgcggcgcgggagtcctgggccgctggcgggcaacgcctctgcccgacctcgctggggaaggctggcgctgctgcccggccggagccaggggcaggctgcgcaaaggtgacttagggagaccttgcgggccgccctgggtcgcgcctcccggatcggctcgcctcggctcgactggaggggaggaggaggagcaggccgagcgcattcgcgctggagcttgcgaggagcgcagggtggagcgcgccagccggggtcctcggatctggcccaggtgaggaattttaaattggaacaagagcaagaaaaaaacaaaatcttgtcagaagcactggagacgctggccactgaacatcatgaattagagcagtctctggtgaaaggctctccacccgccagcatccttagcgaggacgagttctatgatgcgctgtcagattccgagtccgaaaggtccctgagtagattggaagcagtgacagcacgctcctttgaagaggaaggagagcatttgggcagtagaaaacacagaatgtccgaagaaaaagactgtggtggcggagatgctctctccaatggcatcaagaaacacagaacaagtttgccttctcctatgttttccagaaatgacttcagtatctggagcatcctcagaaaatgtattggaatggaactatccaagatcacgatgccagttatatttaatgagcctctgagcttcctacagcgcctaactgaatacatggagcatacttacctcatccacaaggccagttcactctctgatcctgtggaaaggatgcagtgtgtagctgcgtttgctgtatctgctgttgcttctcagtgggaacggactggaaaacctttcaacccactgctgggagagacttatgaattagtgcgagatgaccttggatttagactcatctccgaacaggtcagccatcacccaccaatcagtgcatttcatgctgaaggattaaacaatgacttcatctttcatggctctatctatcccaaactgaaattctgggggaagagtgtagaagcagaacccaaaggaaccatcaccttggagctccttgaacacaatgaggcatatacatggacaaatcccacctgctgtgtgcataatatcattgtgggtaaactgtggatcgaacagtatggcaatgtggaaattataaaccacaagactggggacaaatgtgtgttgaattttaagccatgtggcctttttggtaaggaattacacaaagttgaaggctacattcaagataaaagcaaaaagaagctctgtgccctctatgggaagtggactgaatgtttatacagtgttgaccctgccacgtttgacgcttacaaaaaaaatgataagaaaaatacagaagagaagaagaacagcaaacagatgagcacctctgaggagttggatgaaatgccagtgccggattctgaaagtgtattcattatccctggaagcgttcttctatggcgaatagccccacggcctccaaattctgcccagatgtataattttactagttttgcaatggttttgaatgaagtagacaaagacatggagagtgtgattcccaagacagactgcaggttacggcctgacatcagagccatggaaaatggagagatagatcaagctagtgaagaaaaaaaacgacttgaggaaaaacaaagagcagcccgcaaaaacaggtccaagtcagaagaggactggaagacgaggtggttccatcaaggtcctaatccctacaatggagcacaggactggatttactctggcagctactgggacagaaattacttcaatttgcctgacatttattaaaatgcatacaagtcagggtgtttggctaatctacaaataagtcttaaacctatgtttttaaatttttttcccttggtttctacttatcttttaaaaaaaaaaatgaaaaaacactcatgagataactgcatttcacccaacaaaagcagggtataaggcgatattggtgatgaaagtcttaggaaaaatgcataattttgctataaaatgtacttatttggaatactattttatatagaggtaagagaacactgctggggaatatgctttttatggttgctgttgccatatttactgaaggtttatacctaaatgtaactttagctttatggaactatatagtaatcccaaatcaagttattttgaatatttttatgctgtcatgcttgaatgttttagatgtaacctttgacatatttagaactctcctcctatacaatgtttattctcagatatagaggttatgtcattttataaagacttcattgataagatggcttttattcatactaatcctcccaatgttaccccttccatcttccaagaagaaaaaaaatgcctgaatattcagaatagatatttctgatttgaaaattctaaagaattaaactggaaaagtatttcatttacttagtgctctgaatttacttttacagttttctgcagtcagtatcattaaaatggttaagtttacatttgaactgaaaatatgtataaaatctagcaattcacaaaaatgccctagaaatatagattttaatcaccattacataatgacaaaccttgttaaatgcttccacttccagtggcaaatgccactagggaaagtaagttgcactcatgtaagtatcaaactatataaaaggaggccttgtgcatttcaagtttgcaaagtacctgtgtacttaaaatatgtgtggagacctactgtacagtagttttgcccctttaattggggcacattcatcttaaatcttatagtatttatccacccaaaccccagactgagatactgctcccaggggcctaggtagctgccagtccgtgattttaattgctgtcttgaagttaacaagtgttataatgaaataatctacctgatgctaaataaaggctttagaatgttccccaaaaaaaaaaaaaaaaaaaaaaaa

SEQ ID NO: 161 - DNA, 2415 bp, Homo sapiens
caggagaagaggacaaagatactcagagagaaaaagtaaaagaccgaagaaggaggctggagagaccaggatccttccagctgaacaaagtcagccacaaagcagactagccagccggctacaattggagtcagagtcccaaagacatgggcttgttagagtgctgtgcaagatgtctggtaggggccccctttgcttccctggtggccactggattgtgtttctttggggtggcactgttctgtggctgtggacatgaagccctcactggcacagaaaagctaattgagacctatttctccaaaaactaccaagactatgagtatctcatcaatgtgatccatgccttccagtatgtcatctatggaactgcctctttcttcttcctttatggggccctcctgctggctgagggcttctacaccaccggcgcagtcaggcagatctttggcgactacaagaccaccatctgcggcaagggcctgagcgcaacgtttgtgggcatcacctatgccctgaccgttgtgtggctcctggtgtttgcctgctctgctgtgcctgtgtacatttacttcaacacctggaccacctgccagtctattgccttccccagcaagacctctgccagtataggcagtctctgtgctgacgccagaatgtatggtgttctcccatggaatgctttccctggcaaggtttgtggctccaaccttctgtccatctgcaaaacagctgagttccaaatgaccttccacctgtttattgctgcatttgtgggggctgcagctacactggtttccctgctcaccttcatgattgctgccacttacaactttgccgtccttaaactcatgggccgaggcaccaagttctgatcccccgtagaaatccccctttctctaatagcgaggctctaaccacacagcctacaatgctgcgtctcccatcttaactctttgcctttgccaccaactggccctcttcttacttgatgagtgtaacaagaaaggagagtcttgcagtgattaaggtctctctttggactctcccctcttatgtacctcttttagtcattttgcttcatagctggttcctgctagaaatgggaaatgcctaagaagatgacttcccaactgcaagtcacaaaggaatggaggctctaattgaattttcaagcatctcctgaggatcagaaagtaatttcttctcaaagggtacttccactgatggaaacaaagtggaaggaaagatgctcaggtacagagaaggaatgtctttggtcctcttgccatctataggggccaaatatattctctttggtgtacaaaatggaattcattctggtctctctattaccactgaagatagaagaaaaaagaatgtcagaaaaacaataagagcgtttgcccaaatctgcctattgcagctgggagaagggggtcaaagcaaggatctttcacccacagaaagagagcactgaccccgatggcgatggactactgaagccctaactcagccaaccttacttacagcataagggagcgtagaatctgtgtagacgaagggggcatctggccttacacctcgttagggaagagaaacagggtgttgtcagcatcttctcactcccttctccttgataacagctaccatgacaaccctgtggtttccaaggagctgagaatagaaggaaactagcttacatgagaacagactggcctgaggagcagcagttgctggtggctaatggtgtaacctgagatggccctctggtagacacaggatagataactctttggatagcatgtctttttttctgttaattagttgtgtactctggcctctgtcatatcttcacaatggtgctcatttcatggggtattatccattcagtcatcgtaggtgatttgaaggtcttgatttgttttagaatgatgcacatttcatgtattccagtttgtttattacttatttggggttgcatcagaaatgtctggagaataattctttgattatgactgttttttaaactaggaaaattggacattaagcatcacaaatgatattaaaaattggctagttgaatctattgggattttctacaagtattctgcctttgcagaaacagatttggtgaatttgaatctcaatttgagtaatctgatcgttctttctagctaatggaaaatgattttacttagcaatgttatcttggtgtgttaagagttaggtttaacataaaggttattttctcctgatatagatcacataacagaatgcaccagtcatcagctattcagttggtaagcttccaggaaaaaggacaggcagaaagagtttgagacctgaatagctcccagatttcagtcttttcctgtttttgttaactttgggttaaaaaaaaaaaaaaaaaaa

SEQ ID NO: 162 - DNA, 1231 bp, Homo sapiens
gaattccagaaaagaggtggagagggggggaataagaaagagagagaaggaaaggagagaaggcaggaagaaggcaagggacgagacaaccatgctgtgctgtatgagaagaaccaaacaggttgaaaaaaatgatgacgaccaaaagattgaacaagatggtatcaaaccagaagataaagctcataaggccgcaaccaaaattcaggctagcttccgtggacacataacaaggaaaaagctcaaaggagagaagaaggatgatgtccaagctgctgaggctgaagctaataagaaggatgaagcccctgttgccgatggggtggagaagaagggagaaggcaccactactgccgaagcagccccagccactggctccaagcctgatgagcccggcaaagcaggagaaactccttccgaggagaagaagggggagggtgatgctgccacagagcaggcagccccccaggctcctgcatcctcagaggagaaggccggctcagctgagacagaaagtgccactaaagcttccactgataactcgccgtcctccaaggctgaagatgccccagccaaggaggagcctaaacaagccgatgtgcctgctgctgtcactgctgctgctgccaccacccctgccgcagaggatgctgctgccaaggcaacagcccagcctccaacggagactggggagagcagccaagctgaagagaacatagaagctgtagatgaaaccaaacctaaggaaagtgcccggcaggacgagggtaaagaagaggaacctgaggctgaccaagaacatgcctgaactctaagaaatggctttccacatccccaccctcccctctcctgagcctgtctctccctaccctcttctcagctccactctgaagtcccttcctgtcctgctcacgtctgtgagtctgtcctttcccacccactagccctctttctctctgtgtggcaaacatttaaaaaaaaaaaaaaaaagcaggaaagatcccaagtcaaacagtgtggcttaaacattttttgtttcttggtgttgttatggcaagtttttggtaatgatgattcaatcattttgggaaattcttgcactgtatccaagttatttgatctggtgcgtgtggccctgtgggagtccactttcctctctctctctctctctgttccaagtgtgtgtgcaatgttccgttcatctgaggagtccaaaatattgagtgaattc

SEQ ID NO: 163 - DNA, 1462 bp, Mus musculus
ctcgaggggtgccggctaggcccgactgagagcaagcgaacaggcaggcaagctccgagggggcgcggcccaagctggacaggacaagcgatccagacgcaggagccgtccatcaccaatcagccagcagaacagcgatggaacgcttggcctccagcgataccttcccagtgatagcgcgtagcagcgcctgccgcagcctcttcgggcctgtagaccacgaggagctgggccgcgagctgcggatgcgcctggccgagctgaacgccgaggaccagaaccgctgggacttcaacttccagcaggatgtgcctcttcgaggccctggtcgtctgcagtggatggaggtggacagcgagtctgtgcccgccttctaccgcgagacggtgcaggtggggcgctgtcgcctgcagctggggccccggccacccccggtggccgtggctgtcatcccgcgttctgggccgccggctggcgaggcccccgacggcctagaggaggcgcctgagcagccgcccagcgccccagcctcggccgtggtcgcggagcccaccccacccgcgaccccggccccggcttcagatctgacctcagacccaattccggaggtgaccctggtcgcgacctccgacccgactccggacccgatcccggacgcgaacccggacgtggcgactcgggacggcgaggaacaggtccctgagcaggtctctgagcagggcgaggagtcgggtgctgagccgggtgatgagctgggaactgagccggtctctgagcagggcgaggagcagggcgcagagccggtcgaggagaaggacgaggagccggaggaggagcagggcgcggagccggtcgaggagcagggtgcggagccggtcgaggagcagaatggggagccggtcgaggagcaggacgagaatcaagagcagcgcggccaggagctgaaggaccagcctctctcggggattccaggacgtcctgcacccgggactgctgcggccaatgcgaacgacttcttcgccaagcgcaagagaactgcgcaggagaacaaggcgtcgaacgacgtccctccagggtgtccctctccaaacgtggctcctggggtgggcgcggtggagcagaccccgcgcaaacgtctgagatgagttagtttagaggctaacggccagagagaacttgctgggcatctgggcagcggacgatggaagaactctgggcttcggctgggacctttcgttcatgtagcaggaaccggagatggttgcgtagagcagcccacggttttgtggaaatctgaaaactgtgcaatgtattgagaacactctgtaccatgtgcaaggagtacgctggtcccaaggtgtaaagctttaaatcatttatgtaaaatgtttaatctctactcgctctcagtgcaaaacaaaaagagaaactagaaaatgtagaacgaaggaaaaagatgaga

SEQ ID NO: 164 - DNA, 2499 bp, Rattus norvegicus
  misc_feature (1)..(2499): where n may be a or g or c or t/u, unknown, or other
gattccatcctaatacgactcactatagggctcgagcggccgcccgggcaggtgcgctgtaatctgaaccagctgtgtccagaccgaggccccatttgcattgtttaacatacttagaaaatgaagtgttcacttttaacattcctcctccaattggcttaatgctgaattactgaagggggttaagcgaaaccaggtgccggcggcgagggctctgcagtggctcccagcacccggcactgtccccggccctccgcgcagccccgttcggcccctcggaaaccaagctgcccggtcccgcgcagagcctgccttcctcaaatcacctctcctcccgcgcatcttggatatgccaggattaaaaaggatactcactgtcaccatcctggcactgtggcttccacatcctgggaatgcacagcaacagtgcaccaacggctttgacctggaccgccagacaggacagtgtttagatattgatgaatgtcggaccatccctgaggcttgccgtggggacatgatgtgtgtcaaccagaatggcgggtatctgtgcatccctcgaaccaacccagtgtatcgagggccctactccaatccctactctacatcctactcaggcccatacccagcagccgcaccaccagtgccagcttccaactaccccacgatttccaggcctcttgtctgtcgctttgggtatcagatggatgaaggcaaccagtgtgtggatgtggacgagtgtgcgacagattcacaccagtgcaaccctacccagatctgtatcaacacggaaggagggtacacctgctcctgcactgatgggtactggcttctggaagggcagtgcctagatattgatgaatgtcgctatggttactgccagcagctctgtgcgaatgttcctggatcctattcctgtacgtgtaaccctggcttcaccctcaacgatgatggaaggtcttgccaagatgtgaacgagtgtgaaactgagaacccctgtgttcagacctgcgtcaacacctatggttctttcatctgccgctgtgacccaggatatgaactggaggaagatggcattcactgcagtgatatggatgagtgcagcttctccgagttcctctgtcaacatgagtgtgtgaaccagccgggctcatacttctgctcatgccctccaggctacgtcttgttggaagataaccgaagctgccaggatatcaatgaatgtgagcaccggaaccacacatgcactcccctgcagacttgctacaatctgcaagggggcttcaaatgtatcgaccccatcgtctgcgaggagccttatctgctgattggggataaccgctgtatgtgccctgctgagaatactggctgcagggaccagccattcaccatcttgtttcgggacatggatgtggtatcaggacgctctgttcctgctgacatcttccagatgcaagcaacgacccgataccctggcgcctattacattttccagatcaaatctgggaacgagggtcgagagttctacatgcggcaaacagggcctatcagtgccaccctggtgatgacacgccccatcaaagggcctcgggacatccagctggacttggagatgatcaccgtcaacactgtcatcaacttcagaggcagctccgtgatccgactgcggatatacgtgtcccagtatccgttctgagcctcgggttaaggcctctgacactgccttttaccagcgccgagggacaggaggagagaagaaaccagcaagaatgagagcganacagacattgcacctttcctgctgaacntctccctggggcatcagcctagcatcctgacccctacctgtactatcgcagactgtcactctgaaggacaccatgcccccagttcctatgatgcagttatccaaaagtattctccttgacccctgatgtgaggttgcaagtgactctccaaggccttccatttatttctatttttttttttttaaaaaggaaaatagattaggtttgctggggtaggagtctgtgttcaaagactgagcagcttgttcttgcctctgcccctccttcctctatctcttgctgcattgctgctttgcaaaagtcctcatgagctcatgggaaatgctgggtatagctattttgcttcttgcatgtgctgagaaggctatgggaacacgtcacagcaggatcaaaggtttttaaagagtctattttaaaatcacgtctggtattttcagcataagagaagttttagttgttcttacaatttgtatgagtgtttaaccttttctcgttcattttgagtttttaaagtgatagaattccttccagaaggcctcagatacatgttatgttcagtctttctaacctcagccttccctgcgtcttagcccagtttttatgaagacccctttaatcatgctttcttaagagtttttacccaactgggttggaagacagaggtatccggactgattaaatatttgaagaa

SEQ ID NO: 165 - DNA, 498 bp, Rattus rattus
tgtgtgcgatcgcggtggatcgctaccatgaaccacacttctcaagccttcgtgaacgctgccactgggggacaacccccaaactacgaaagaatcaaggaagaatatgaggtgtctgaactgggggctccccacggatcggcttctgtcagaactaccgtgatcaacatgcccagagaggtctctgtgcctgaccatgtggtctggtccctgttcaatacgctcttcatgaacttctgctgcctgggcttcattgcctatgcctactctgtgaagtctagggatcggaagatggtgggtgatatgactggagcccaggcctacgcatccactgccaaatgcctgaacatcagctccctggtcctcagcatcctcatggtcattatcactattgttactgtcgtcatcattgctcttaatgctcctcgtctccagacttgatagaggattctggtttctgatcctgacgtgcttcacgctctgctggctgcccttttt

SEQ ID NO: 166 - DNA, 2191 bp, Mus musculus
cggacgcgtgggtgggaactgacgagtttttgagcgactctgactccagcactatgtctgacaaacggcagtccagccatgtccagtctcagcggatccctgagtccttcagagaaaattccaagacagaactgggagcttgtggatggattttggtggctgcctcgttctttttcgtaattataaccttcccaatatcaatatggatttgcataaagattgtaaaagagtatgagagagtcatcatctttagactgggtcgcattttgcaaggaggcgccaaaggaccaggtttgttttttatcctgccgtgcactgacagcctcatcaaggtggacatgaggaccatctcctttgacattcctccgcaggaggtcctcactaaggactcggtgacaatcagtgtggatggtgtggtctactaccgtgttcagaacgcaaccctggctgtggccaatatcaccaatgcagattcagcaacccgtcttttggcacaaactaccctcaggaatgcgctgggcaccaagaacctgtctcaaatcctcagcaccaaaacagagacatgttggcttgtaaataacgagagaatgagatggctggcttatgcacagttctcttactctttaagtttgcgtcttttttcttaagtagttgaggccaacttctgacttcctttaactcattctgaaccatgaatgagcaggcaagtcagggcaagggacacagcctagacatgccacctgagcccaggtagatgttccatgacactgaagaattgtgccacccacttctctggccacctgtgcattcattcccttgagaggatattttggattgttttgttttgttttgttttgagacagggtttctctgagtggccttggctgtcctggccttgctctcagagatccccttgcctctacccccgccccacccgagtgccaccaccaccacctcgccttaaggaagggtatttccccaaagttcatccacccagtctaagcccagagcttgtttgggagggatcctctccttcctcctgcttgatcctgtaggagccaacagagaggcccacgctgacccttccgaggccgaaggtcactcctgccatagtccttttgaaaatagtaggtgcacttttaaaaaaaccttcttgggcctcccctccctgacttgatgacccctctgtgtgtggcctttaaagcagctaattcctgtcacagaagtgctctttctcacttgtgcctattctcatggatcaggtttttacatcatcttgatttttaaaaataacttggagttctatcaataaatttttatgtccatttgattagcttaagtactgaagtacctttaaattttttaaagaaagcatcatactttgctctgtacatactattaactgttgtatactgtggtatgttttaattactaaccctacctaagtagcataaggaatccctaacacaagagcttgtgattgacctgtgcagacgcccctgctgagccctccgtgcacagggagaatgcttatgtttgattcattttgtggggttttctttctcatataaaaccagtagaggatcacagttccttattgtgacatccttcccttggcctggaaagcttggtggtggcttttgcaacagcttgaggggggggggggattcttgactcagctggaggagcctggaagaatggttccctgtcacagtagtactgttgacacctgccctgagctgttcactgccaggcccacgtggagcccatgacagacactctgtccctaagccttgagcccagcagggttttctagaggtgtatagagcacttccacctggactcaagttgcatttacattttgagtttaaaaagatgtttttttttaatctgtttatagaagtagctcaccttccactgaggaccaggaaaccctgtgtcctggtaaaacaccttggagacaggaaacaatgcccctggttttctaaatttcctgtccagacaccaactggcctttgcttctgtgccttgtgaattagtaatccagtaggctaaaactcagtcacagggaggggaggagaagagcaagcctagaggaaggggtgctggtgggagggtttccacgcattccccccttcagctgtgtacaataaagtgcgtgccctgtgacccgaaaaaaaaaaaaaaaaaa

SEQ ID NO: 167 - DNA, 3397 bp, Rattus norvegicus
gctgcgggggctccgagggttccgggggccttcggctgctggtctgcctgctgttgttgagcggccgccccgggggctgcagcgccatcagtgcccacggctgtctctttgaccgcagactttgttcgcatctggaagtctgtattcaggatggcttgtttggacagtgccaggcaggagtggggcaggcacggcccctcttacaagtcacttccccagttctccagcgcttacaaggtgtgctccggcaactcatgtcccaaggcttgtcctggcatgatgacctcacccagtatgtgatctcccaggagatggaacgaatccccaggcttcgtcccccagaacctcatccaagggacagatctggatcggtgcccaggagagcaggcccagcaggggaattgctttctcagggcaatcccactggctcctctcctgctgtccaggggctctctcggcctccaggggatgggaatggagctggggtgggctccccactgtcctctctgcaggctgagctgttaccccctctcttggagcatctgctaatgcccccgcagcctccacacccgtctctgacctatgaacctgcattgctacaaccttacttgttccagcagtttggttcccgagatggctcccggggctcagagagcgcctctggggtagttggccatctggccaaggctgaagatcctgtactcttcagcagaagcctctccaaggccattttggggactcactctggacactcctttggtgaccttacaggtccctcacctgctcagcttttccaggattcagggctgctctacatggcccaagagttgccagtgcctggcagagcccgggcgccaaggttgccagaggaaggggggagcagccgggcagaggactcttcagagggccatgaggaggaagtactagggggtcatggggagaagtcccctccccaagcagtacaagcagatgtaagtctgcagagattggctgctgtgctggcaggctacggagtagagctgcgtcagctgaccccggaacagctttctaccctcttaaccctgctgcagttactgcccaagggcacaggaagacatcttggaggggctgtgaacggaggagccgatgtcaagaaaacaatagaagaacaaatgcagagaggggacacagcagacgctcggccccccacacccttgcttcctggacaccccactgccagctccacctccatcaaagttcggcaggtgctgagccctggtttccctgaacctcccaagacatccagtcctctgggcatctcggctgtcctgctggagaagaaaagtcccttgggccagagccagcccacagtggtgggacagacttcagctcgaccgtccgctgaggagtatggctatatagtcactgatcagaaacccctgagtctggtggctggagtgaagttgctggagatcctggctgaacatgtgcacatgacttcaggcaggttcatcaacatcagtgtggtaggaccagttgtcacctcccgaatccggcacaatgagcagaacctgtctttggcagatgtgacccagcaagctgggctggtgaagtctgaactggaagcgcagacagggctccagattttgcagacaggggtgggacagagggaggaagcagctgaagtccttccccgacaagcccatggcatatctcccatgcgctcagtgctgcttactctagtggccctggcaggcgtcgctgggctgctagtggctttggcagtggccttgtgtatgcgccatcattcgagacagcgggataaggagcgcctggcagcgctggggccggagggggcccatggtgacactacttttgagtaccaggacctgtgtcgccagcacatggccacaaagtccctgtttaaccgggcggagggtcagccagagccttctagggtgagcagtgtttcctccaagttcagtgacgcggcccaggccaaccccagttcccacagcagcaccccgtcctggtgcgaggagcctgcccaggccaacatggacatctccacaggacacatgattctggcatacatggaggatcacctccggaaccgggaccggttgcccaaggagtggcaggccctgtgcgcctaccaagcggagccaaacacctgttccaccgcacaaggtgaaggcaacatcaagaagaaccgccatcctgacttcttaccctatgaccatgcccgaatcaagctgaaagtggagagcagcccctctcggagtgattacatcaacgccagtcccatcatcgagcatgaccctcggatgccggcctacatagccacacagggacccctgtcccacaccatcgcagacttctggcagatggtgtgggagagtggctgcactgtcatcgttatgctgacccctttggtggaggatggtgtcaaacagtgtgaccgctactggccggatgaagggtcctccctctaccacgtctatgaggtgaacctggtgtctgagcacatctggtgcgaggacttcctggtgcggagcttctacctgaagaacgtgcagacccaggagacgcgcacgctcactcagttccacttcctcagctggccggcagagggcactccggcctccacccggccgctgctggacttccgcaggaaagtgaacaagtgctacagaggccgctcctgtcccatcatagtgcactgcagtgacggtgcagggaggacaggcacctacatccttattgacatggtcctgaatcgcatggccaaaggagtgaaggagattgatattgctgccaccctggagcatgtccgtgaccagccgacttgccttgtccgttctaaggacaagtttgagtttcccttgacacccgtgggggaggaggtgaatcctatcctcaaggccctcccccagtgagcccccctgggtacctcagtgggcatcctggcctctgctccttctgcctgtgtgtgagcatttgtgcacccactcttcagcccctacccatctgccaccttggtccgtccgacttgggcatgatagccctttccaacccagtgtggaaggaagtcgggagggaaggggcaggtccaccctgctttattcacgctagaaccaagatctcctgtgggaaacagacagcaggcaaggggaggagtggacaccagcagcaagtgtgcccgagccccatccttcctgagtctctgtctccctctgtgtgtgtacctccccactcccaccagcctatcgtgtatagacaaagcagaatgagaaggccccagctccccccagtcctgctaccactggcctgccaccttgaccctgctcaaccttctccctctagcacaacccaaacatttctagaaaaatctacttttgtatcaatgtgaataaag

SEQ ID NO: 168 - DNA, 630 bp, Rattus norvegicus
cagaaccagggtagcagcagccatcctccagacggtgcgattgttccagagtcaataccatgagccacaattcccaagccttcttgcccgccaatgccgggcttcctccaagctatgagacaatcaaagaggagtacggggtgactgagctgggggaacccaacaactcagctgtcgtgaggaccaccgtgatcaacatgcccagagaggtctctgtgcctgaccatgtggtctggtccctgttcaatacgctcttcttcaatgcctgctgcctgggcttcattgcctatgcctactctgtgaagtccagggacaggaagatggtgggcgatgtgattggagcccaggcctacgcctccactgccaagtgcctgaacatcagctccctgatcttcagtgtcctcatggtcattatctgcatcatcattttctctaccacctctgcggtagtctttcagtcgctttcacaaagaacgccacattctggattctagctgccctgtgtcccacggtccacatctggccctccccctgcctgaggctgagggcttgaccctttaccctatgtgtatgcaaatgttaccttcgtatatctgtccacagtggagtcaataaagtacacttggtggc

SEQ ID NO: 169 - DNA, 678 bp, Rattus norvegicus
ttggtctgtgttcaaacattgctcagtattgatcatgtgcaacggccaaaggaacactgttttcatcaaacgtgggtgtgtcgtgtctaacatgcaattgtaataaagccatgtgaaagaattgtgttttgtttggctctggtcacttaaagtggcagcctgtgtagttgctaacctcttgttgtgtaagcaaaaccaataaacactcaaatggtttaaaagagcagcttgcctttctctattcattcacaaatcctatgtcgatcattaaagggaatagagatcgtgtacacggatattattcatgttaaatatataattatcaagaaatagaagtgacgttaagtgccactatggtcatcacaccacacacacacacacacacacacacacacacacacacacacacacatatagccatcccttacagttgatcattttctgatcacacatatgtagctatccctcatagttgatcattttctgatcatacatacctcgccattcttcattcacagttgatcattttctagtcaccacccggtatctttacctttccgtatctgcataggccctttaattctgttatgctacattaaagaagacactcgaggactactcattgcatttcacaagcagccttctctagtgttgactatatcatggtagaatgaaatt

SEQ ID NO: 170 - DNA, 2643 bp, Homo sapiens
ccgcacttccagctctctgcgcagcccgccgcgcagcccgccgccccagccatggcgaagcccctgacggaccaggagaagcggcggcagatcagcatccgcggcatcgtgggcgtggagaacgtggcagagctgaagaagagtttcaaccggcacctgcacttcacgctggtcaaggaccgcaacgtggccaccacccgcgactactacttcgcgctggcgcacacggtgcgcgaccacctggtggggcgctggatccgcacgcagcagcactactacgacaagtgccccaagagggtatattacctctctctggaattttacatgggccgaacattacagaacaccatgatcaacctcggtctgcaaaatgcctgtgatgaggccatttaccagcttggattggatatagaagagttagaagaaattgaagaagatgctggacttggcaatggtggtcttgggagacttgctgcctgcttcttggattccatggcaaccctgggacttgcagcctatggatacggcattcggtatgaatatgggattttcaatcagaagatccgagatggatggcaggtagaagaagcagatgattggctcagatatggaaacccttgggagaagtcccgcccagaattcatgctgcctgtgcacttctatggaaaagtagaacacaccaacaccgggaccaagtggattgacactcaagtggtcctggctctgccatatgacacccccgtgcccggctacatgaataacactgtcaacaccatgcgcctctggtctgctcgggcaccaaatgactttaacctcagagactttaatgttggagactacattcaggctgtgctggaccgaaacctggccgagaacatctcccgggtcctctatcccaatgacaatttttttgaagggaaggagctaagattgaagcaggaatactttgtggtggctgcaaccttgcaagatatcatccgccgtttcaaagcctccaagtttggctccacccgtggtgcaggaactgtgtttgatgccttcccggatcaggtggccatccagctgaatgatactcaccctgcactcgcgatccctgagctgatgaggatttttgtggatattgaaaaactgccctggtccaaggcatgggagctcacccagaagaccttcgcctacaccaaccacacagtgctcccggaagccctggagcgctggcccgtggacctggtggagaagctgctccctcgacatttggaaatcatttatgagataaatcagaagcatttagatagaattgtggccttgtttcctaaagatgtggaccgtctgagaaggatgtctctgatagaagaggaaggaagcaaaaggatcaacatggcccatctctgcattgtcggttcccatgctgtgaatggcgtggctaaaatccactcagacatcgtgaagactaaagtattcaaggacttcagtgagctagaacctgacaagtttcagaataaaaccaatgggatcactccaaggcgctggctcctactctgcaacccaggacttgcagagctcatagcagagaaaattggagaagactatgtgaaagacctgagccagctgacgaagctccacagcttcctgggtgatgatgtcttcctccgggaactcgccaaggtgaagcaggagaataagctgaagttttctcagttcctggagacggagtacaaagtgaagatcaacccatcctccatgtttgatgtccaggtgaagaggatacatgagtacaagcgacagctcttgaactgtctgcatgtgatcacgatgtacaaccgcattaagaaagaccctaagaagttattcgtgccaaggacagttatcattggtggtaaagctgccccaggatatcacatggccaaaatgatcataaagctgatcacttcagtggcagatgtggtgaacaatgaccctatggttggaagcaagttgaaagtcatcttcttggagaactacagagtatctcttgctgaaaaagtcattccagccacagatctgtcagagcagatttccactgcaggcaccgaagcctcggggacaggcaatatgaagttcatgctaaatggggccctaactatcgggaccatggatggggccaatgtggaaatggcagaagaagctggggaagagaacctgttcatctttggcatgaggatagatgatgtggctgctttggacaagaaagggtacgaggcaaaagaatactatgaggcacttccagagctgaagctggtcattgatcaaattgacaatggctttttttctcccaagcagcctgacctcttcaaagatatcatcaacatgctattttatcatgacaggtttaaagtctttgcagactacgaagcctatgtcaagtgtcaagataaagtgagtcagctgtacatgaatccaaaggcctggaacacaatggtactcaaaaacatagctgcctcggggaaattctccagtgaccgaacaattaaagaatatgcccaaaacatctggaacgtggaaccttcagatctaaagatttctctatccaatgaatctaacaaagtcaatggaaattgaactctacaatgtctctagaaaacatagcttcttactgaacttgaacat

SEQ ID NO: 171 - DNA, 2130 bp, Homo sapiens
gtaataagagcggggtctccgcggggaaggcgcccacagcaggtgtggtgttcatcccgggtcgaccggccgctcgcgctgccctgaaactctagtcgccagagaggcggcatgggtttccggaagttctcccccttcctggctctcagtatcttggtcctgtaccaggcgggcagcctccaggcggcgccattcaggtctgccctggagagcagcccagacccggccacactcagtaaagaggacgcgcgcctcctgctggctgcactggtgcaggactatgtgcagatgaaggccagtgagctgaagcaggagcaggagacacagggctccagctccgctgcccagaagagagcctgcaacactgccacctgtgtgactcatcggctggcaggcttgctgagcagatcagggggcatggtgaagagcaacttcgtgcccaccaatgtgggttccaaagcctttggcaggcgccgcagggaccttcaagcctgagcagatgaatgactccaggaagaaggtgtgtcctaaatccaatgacatatccttataagagattcactcagaagacacatgtggagaaggtgacatgacagaggcaaggaggcacaagccaaggaagtctgtgtctaccagaagccagaatcacagaacagtctctggaagaagagcagccctgctgacacctagagtttggacttccagcttccagaactgtgagagaataatttctgttgttttaagccacaaagtttgtggtaatttgttatgacagccctaggaaactaatacaatacattttcatttattttgggtaaatgccttggagtgggattgctgggttatttggaaagtgtgtatttaactctgtaagaaactgccaaactattttctgaagtgactgtaccacttcgccttcttgccagccacatatgagagctctagtatttccacaaataggtatgtagcagtatctcattgctgttttaatttgtatttccccaatgactaatgacgttgagcatctattttaccatatgtttatcacctttattgaagggtctgtttaaatcttctgctaaatttttgttggcttgcttgctttattagtgttgagtttttagagctctttatatgttgtggatgcaagattgttttcagatatatagtttggaaacttccttcccctgaatctgcggattgctttttcattttcttagcagtgtctctcacagagaaaaagttgtaatttgaataagatccaattcatctttttttttcttttatgtattgtgcttttagttcatgtctaagaactctttgcctaactaaggtcccaaggtcacaataaccttattctatactttcttgtaaaagttttatagttttatattttatatgtagattagtgatctattttgagttaatttttgtataaggtgagaggtgtaggttgaaattcatacctgtgaatatagatacccaattgtttcagtgccatttgttaaaaagactgttatttcaccatttaattgcccctgcacctttgtcaaaaagcaactgatcatatttgtgtgggtatatttctgggttctcaattctgtctcattgattgatttgaccattcttttgccaatgtcatactgccttgattagtgtagtgttaaagtgaatctcaaaaccagataatgtgggtctaccaacattgttcattcttgttcaaaaagattttagctacatctaaaatattttctacatcttttatacattttagaatcagtgtgttactatctacaaaatttctgatgagatttttaatgggattgtgttaaatcagtgggttaattttgggagaattagcatattaataatattaagtcgttcaattcatgaacacaatacatgttttcacttatttaggttttctctgtttttttttttttaacagtgttctcagttttcaacagaaatattctacacatatcttgttagatttttaactattttattttttggtgctaatgtaaatggtacttaaacatttttgtttttaattgttcattgctagtagatagaaatacaatatttaaaatattaggaaaaaaaaaaaaaaaaaaaaaaaaaaaaaaa

SEQ ID NO: 172 - DNA, 534 bp, Homo sapiens
cgactttcccgatcgccaggcaggagtttctctcggtgactactatcgctgtcatgtctggtcgtggcaagcaaggaggcaaggcccgcgccaaggccaagtcgcgctcgtcccgcgctggccttcagttcccggtagggcgagtgcatcgcttgctgcgcaaaggcaactacgcggagcgagtgggggccggcgcgcccgtctacatggctgcggtcctcgagtatctgaccgccgagatcctggagctggcgggcaacgcggctcgggacaacaagaagacgcgcatcatccctcgtcacctccagctggccatccgcaacgacgaggaactgaacaagctgctgggcaaagtcaccatcgcccagggcggcgtcttgcctaacatccaggccgtactgctccctaagaagacggagagtcaccacaaggcaaagggcaagtgaggctgacgtccggcccaagtgggcccagcccggcccgcgtctcgaaggggcacctgtgaactcaaaaggctcttttcagagccaccca

SEQ ID NO: 173 - DNA, 1760 bp, Homo sapiens
gcagcaggccaagggggaggtgcgagcgtggacctgggacgggtctgggcggctctcggtggttggcacgggttcgcacacccattcaagcggcaggacgcacttgtcttagcagttctcgctgaccgcgctagctgcggcttctacgctccggcactctgagttcatcagcaaacgccctggcgtctgtcctcaccatgcctagcctttgggaccgcttctcgtcgtcgtccacctcctcttcgccctcgtccttgccccgaactcccaccccagatcggccgccgcgctcagcctgggggtcggcgacccgggaggaggggtttgaccgctccacgagcctggagagctcggactgcgagtccctggacagcagcaacagtggcttcgggccggaggaagacacggcttacctggatggggtgtcgttgcccgacttcgagctgctcagtgaccctgaggatgaacacttgtgtgccaacctgatgcagctgctgcaggagagcctggcccaggcgcggctgggctctcgacgccctgcgcgcctgctgatgcctagccagttggtaagccaggtgggcaaagaactactgcgcctggcctacagcgagccgtgcggcctgcggggggcgctgctggacgtctgcgtggagcagggcaagagctgccacagcgtgggccagctggcactcgaccccagcctggtgcccaccttccagctgaccctcgtgctgcgcctggactcacgactctggcccaagatccaggggctgtttagctccgccaactctcccttcctccctggcttcagccagtccctgacgctgagcactggcttccgagtcatcaagaagaagctgtacagctcggaacagctgctcattgaggagtgttgaacttcaacctgagggggccgacagtgccctccaagacagagacgactgaacttttggggtggagactagaggcaggagctgagggactgattccagtggttggaaaactgaggcagccacctaaggtggaggtgggggaatagtgtttcccaggaagctcattgagttgtgtgcgggtggctgtgcattggggacacatacccctcagtactgtagcatggaacaaaggcttaggggccaacaaggcttccagctggatgtgtgtgtagcatgtaccttattatttttgttactgacagttaacagtggtgtgacatccagagagcagctgggctgctcccgccccagcctggcccagggtgaaggaagaggcacgtgctcctcagagcagccggagggaggggggaggtcggaggtcgtggaggtggtttgtgtatcttactggtctgaagggaccaagtgtgtttgttgtttgttttgtatcttgtttttctgatcggagcatcactactgacctgttgtaggcagctatcttacagacgcatgaatgtaagagtaggaaggggtgggtgtcagggatcacttgggatctttgacacttgaaaaattacacctggcagctgcgtttaagccttcccccatcgtgtactgcagagttgagctggcaggggaggggctgagagggtgggggctggaacccctccccgggaggagtgccatctgggtcttccatctagaactgtttacatgaagataagatactcactgttcatgaatacacttgatgttcaagtattaagacctatgcaatattttttacttttctaataaacatgtttgttaaaacaaaaaaaaaaaaaaaaa

SEQ ID NO: 174 - DNA, 2053 bp, Homo sapiens
ccggctcgcgccctccgggcccagcctcccgagccttcggagcgggcgccgtcccagcccagctccggggaaacgcgagccgcgatgcctggggggtgctcccggggccccgccgccggggacgggcgtctgcggctggcgcgactagcgctggtactcctgggctgggtctcctcgtcttctcccacctcctcggcatcctccttctcctcctcggcgccgttcctggcttccgccgtgtccgcccagcccccgctgccggaccagtgccccgcgctgtgcgagtgctccgaggcagcgcgcacagtcaagtgcgttaaccgcaatctgaccgaggtgcccacggacctgcccgcctacgtgcgcaacctcttccttaccggcaaccagctggccgtgctccctgccggcgccttcgcccgccggccgccgctggcggagctggccgcgctcaacctcagcggcagccgcctggacgaggtgcgcgcgggcgccttcgagcatctgcccagcctgcgccagctcgacctcagccacaacccactggccgacctcagtcccttcgctttctcgggcagcaatgccagcgtctcggcccccagtccccttgtggaactgatcctgaaccacatcgtgccccctgaagatgagcggcagaaccggagcttcgagggcatggtggtggcggccctgctggcgggccgtgcactgcaggggctccgccgcttggagctggccagcaaccacttcctttacctgccgcgggatgtgctggcccaactgcccagcctcaggcacctggacttaagtaataattcgctggtgagcctgacctacgtgtccttccgcaacctgacacatctagaaagcctccacctggaggacaatgccctcaaggtccttcacaatggcaccctggctgagttgcaaggtctaccccacattagggttttcctggacaacaatccctgggtctgcgactgccacatggcagacatggtgacctggctcaaggaaacagaggtagtgcagggcaaagaccggctcacctgtgcatatccggaaaaaatgaggaatcgggtcctcttggaactcaacagtgctgacctggactgtgacccgattcttcccccatccctgcaaacctcttatgtcttcctgggtattgttttagccctgataggcgctattttcctcctggttttgtatttgaaccgcaaggggataaaaaagtggatgcataacatcagagatgcctgcagggatcacatggaagggtatcattacagatatgaaatcaatgcggaccccagattaacaaacctcagttctaactcggatgtctgagaaatattagaggacagaccaaggacaactctgcatgagatgtagacttaagctttatccctactaggcttgctccactttcatcctccactatagatacaacggactttgactaaaagcagtgaaggggatttgcttccttgttatgtaaagtttctcggtgtgttctgttaatgtaagacgatgaacagttgtgtatagtgttttaccctcttctttttcttggaactcctcaacacgtatggagggatttttcaggtttcagcatgaacatgggcttcttgctgtctgtctctctctcagtacagttcaaggtgtagcaagtgtacccacacagatagcattcaacaaaagctgcctcaactttttcgagaaaaatactttattcataaatatcagttttattctcatgtacctaagttgtggagaaaataattgcatcctataaactgcctgcagacgttagcaggctcttcaaaataactccatggtgcacaggagcacctgcatccaagagcatgcttacattttactgttctgcatattacaaaaaataacttgcaacttcataacttctttgacaaagtaaattacttttttgattgcagtttatatgaaaatgtactgatttttttttaataaactgcatcgagatccaaccgactgaattgttaaaaaaaaaaaaaaataaagattcttaaaagaa

SEQ ID NO: 175 - DNA, 5047 bp, Homo sapiens
ccgttgctgtcgccgttgctgtcgggggcgctgtgcgctgaggaaggcgcgggcgagccggagcagaagaaggagggagggagccagccgctgcagccaccaccgccaccatgtcctaccaaggcaagaagaacatcccgcggatcacgagtgaccgtctccttatcaagggaggcagaatcgtcaatgatgatcagtccttttatgctgatatttacatggaagatggcttaataaaacaaattggagacaatctgattgttcctggaggagtgaagaccattgaagccaatgggaagatggtgatccctggaggcatcgatgtccatactcacttccagatgccatataagggaatgaccacagtagatgacttcttccaagggacaaaggcggccttagcaggtggcaccaccatgatcattgaccatgtggtgcctgagcctgagtccagcctgactgaggcctatgagaaatggagagagtgggctgatgggaagagttgctgtgactatgccctgcatgtggacatcacccactggaatgacagcgtcaagcaggaagtgcagaacctcatcaaggacaaaggggttaactccttcatggtttatatggcttataaggatttgtatcaagtatctaacacagagctctatgagatcttcacctgcctgggagagctgggggccattgctcaagttcatgctgagaatggggatatcattgcccaggagcaaacccgcatgttggaaatggggataactggcccagaaggccatgtactgagcaggccagaagagctggaagctgaggctgtgttccgtgccatcaccattgccagccaaaccaattgccctctctacgtcacaaaggtcatgagcaagagtgcagctgacctcatctcacaagccaggaaaaaaggaaatgtagtctttggtgagcccatcactgccagcctcggcatagatggaacccattattggagcaagaactgggccaaggcggctgcatttgtgacatccccacccctgagccctgacccaactactccggactacatcaactccttgctggccagcggggatctgcagctatctgggagtgcccactgcaccttcagcactgcccagaaagcaattgggaaggacaacttcacagccattcctgagggcaccaatggtgtggaggagcggatgtctgtcatctgggacaaggctgtggccacagggaaaatggacgaaaaccagttcgtggctgtgacaagcacaaacgctgccaagatcttcaacctgtatccccgcaagggaagaatatctgtgggttctgacagcgacctcgtcatctgggatccagatgctgtgaagatcgtctctgccaagaaccaccagtctgcggcagagtacaacatctttgaagggatggagctgcgcggggctcctctggttgtcatctgccagggcaagatcatgctggaagatggcaacctgcacgtgacccagggggctggccgcttcataccctgcagcccgttctccgactatgtctacaagcgcattaaagcacggaggaagatggcagacctgcatgccgtcccaaggggcatgtacgatgggcctgtgtttgacctgaccaccacccccaaaggtggcacccccgcaggctctgctcggggctctcctactcggccgaacccacctgtgaggaatcttcatcagtcgggatttagcctgtcaggcacccaagtggatgagggggttcgctcagccagcaagcgcatcgtggcccccccaggcggccgttctaatatcacatctctgagttaagcaagccttcctcaaagagaggggcagaagcaagaagagattgttttgaagccaaaatggtacaccgatatttaagaaggaaagcgaatccaaacggttgtgatctaaagaatcaataagcctcaagccttatgtttctccaatgttacgctcgcttgcctagctttacgaatattgctttgttttctgtttatgcatagccttgatttgtttgactcccctccccccatttacatgcatgcaatcagacaggccactaaggtaaaagagtctgctctatcatagtgttgagagcgtgtgtagtgctgcatcttatgacaaggggacagacaagctgggacgtcagggaaatgaacaaaagggacgcaggttatttggggtgagtgggtggtgggagcctggagcaaggtggagggtgcagaggggctggggtagggcatgtaggagggaggtgggtgggtcaggtgagtggaaggggtgttgtatattgtgttgatgacgtacgttatttccatggaagatagccgctgtggcagctgtcacatcaccacagctccctagggtctgccgagaaggcaggcagtctttgggttctgttctttgtcacgtcccctacaagtaaattttgtttctttgaacgtttattaaaatgccaagacccaaccatttcttccacctgcttgattgtgccagtgtttgctcaggcctctttcttagtgttgctttcaaatccttctctttcctgggttgggaaggccaggcagggacagagcaaatgacacttctcttcctcttgccctccctgcctctttggtgctcttaaaagccagcagctgagaacatagcacaggcccacgtggtgagggcacccacagcttaaagacgcttccttctaaacacggcgaggtcacctctcactcttctgtctttgcaaaccgagaagagtggcatgcttctggcatcccaagtcaggattttagctcagatgaggcagaatgaagggcctctcttacaggcagtttgtgtttgattctctcgatcctggcacatccatgataaataggagtttttgaaagttggttttattaggtgttccctaatttttaccgtaataggtcatctcagcttatatgaaagtcaagtggggaactgggaaagccaaagtcagtcttgagcagagggagcacattttgtggacctggttccacctttccattccaaaccacctgtttccccttccattagcagaaactctgggggaactttgtgtctcagtcctagaatctccccaagtgagtggaagtgacatgatgcagtcttcctcatggggcacctgaaagaaattagtgtgggtgcttcgatctaccttgtctgtcagagttgaatatctctttccctatcatgctgcttctgaaaattcagttttggagcaagtcctgtgagcaagataagaatctatagaaccaagatgctcattttcagaagaaatatgttcaacctgggatcagacttccatgctctggggaatccaagtggtagcacctgtaaccctgtgtactaagtgctttgaagagaagagcaggcctcagacaccttttaattgcttaggagaaaccattgtctctgactgcaggtttgaataagttgaagaccagagaaaagtacacactgggctacaaaggaatttggagatagccaaggaacaggatttcccctagcaagctaccttctgttcaaatcatgaaaaaagactatttccccttagaatagggaagcttgctattttaaagctcttgtagtgcttttcttttaagggagatgtagtaaaagggaaaatgtagctcttagtttacacttcaaagatgtgggggtctttcagagaactaagaataacagttttatgtgcagagagagtttgccagatctgaagcatatacctcattgactaggctgttactttgggataggttgcagtaccagccacagccagcagatagaggaaaagacacacataaactcgcttctgagcgtccacttctgcactctctgctctgctgttactcagcccctgagtctgactcatctctgcacaacctctctgtgccatgaagataagtcttccatggccaaatcggtcatccgcactgcccttgggacttccgaagtgaaccattccaccagaacctttgattctgcacaagatttccttgctctgggaacaacccccaaatgcccttgggaggaacaacatgagctcaggaagcctctctttcttcacttaccattactaactctccaagcatagaaatccctgggaattgcgagaataactcccactattttaaaatttatattcagatttgtttcgtttcataagacacatcaaacaggcctatacaaaaggtttaggaaaagaaaacaatggtgagtcccggccctcttcgaattcactggcacctcatgcaagtgtaggaaggcacgctggatcgtctatctgattccaaagctgtcctttgccatctcatcccttggcctgccccccaaccctgaggatgcccctgccatccccccaacctcctcatattgcctctgaacccagatggcaatccatcccggttctctctgagggccacgggcttgggtagtggaaagggtgtttgggaaattgttaaatcagttacccgtagtagagctatttcttgtacttctaagttttctagaagtggaaggattgtagtcatcctgaaaatgggtttacttcaaaatccctcagccttgttcttcacgactgtctatactgagagtgtcatgtttccacaaagggctgacacctgagcctggattttcactcatccctgagaagccctttccagtagggtgggcaattcccaacttccttgccacaagcttcccaggctttctcccctggaaaactccagcttgagtcccagatacactcatgggctgccctgggcagccagcattcattgtaagttccctctttgaaaactggtgtgtgggtgttcagttctgtgtctggtgggtatggacagacagtaatctcctgtgatctgtgctagctgtgaggcagctctggaacgtgaagagctgtttggtttgaaccgtgaacaaaactgtgttttgagtttagctgacattaaagaaaaaagttcatcacgtgactgttaatgtaaacctggttattaaaataactatgaaattac

SEQ ID NO: 176 - DNA, 980 bp, Homo sapiens
ggggcagacgtgggacgggaaggacggctgccgggactggcgcgcggggacactgggccgacgcgtggagtagcggggagagcgggaagcctgagggggcggggccggcgcgaggccgtgggtgcggcacgaggatgccggcggcgggacagcgcccgtaggcagccccacgggcagggcgcgcgggcggggcggggcgggccgggccagaggagctcccggcatgtcgcaagggctcccggccgccggcagcgtcctgcagaggagcgtcgcggcgcccgggaaccagccgcagccgcagccgcagcagcagagccctgaggatgatgacaggaaggtccgaaggagagaaaaaaaccgagttgctgctcagagaagtcggaagaagcagacccagaaggctgacaagctccatgaggaatatgagagcctggagcaagaaaacaccatgctgcggagagagatcgggaagctgacagaggagctgaagcacctgacagaggcactgaaggagcacgagaagatgtgcccgctgctgctctgccctatgaactttgtgccagtgcctccccggccggaccctgtggccggctgcttgccccgatgaagccggggacactcctctgcccagcaaggagccttggtcattttcatacctgggaggaaggcttttccttcacaattgtatacagggggcacctgtggccaggcctcctcctgggagctccaggaccagccagctgtgttccctgcagactgggctcagcccgacatccaacaggcgccaaactcacagagcccttgtgcagatccagcatggaggccaccctcaggagtgacttctcatccaccctggcagctagtaggttctgctgttatgcagagccatttcctctagaatttggataataaagatgcttattgtctctcccttctccagttctgggaatttacaggcacaatacacttccttttcctgg

SEQ ID NO: 177 - DNA, 1804 bp, Homo sapiens
gtatcactcagaatctggcagccagttccgtcctgacagagttcacagcatatattggtggattcttgtccatagtgcatctgctttaagaattaacgaaagcagtgtcaagacagtaaggattcaaaccatttgccaaaaatgagtctaagtgcatttactctcttcctggcattgattggtggtaccagtggccagtactatgattatgattttcccctatcaatttatgggcaatcatcaccaaactgtgcaccagaatgtaactgccctgaaagctacccaagtgccatgtactgtgatgagctgaaattgaaaagtgtaccaatggtgcctcctggaatcaagtatctttaccttaggaataaccagattgaccatattgatgaaaaggcctttgagaatgtaactgatctgcagtggctcattctagatcacaaccttctagaaaactccaagataaaagggagagttttctctaaattgaaacaactgaagaagctgcatataaaccacaacaacctgacagagtctgtgggcccacttcccaaatctctggaggatctgcagcttactcataacaagatcacaaagctgggctcttttgaaggattggtaaacctgaccttcatccatctccagcacaatcggctgaaagaggatgctgtttcagctgcttttaaaggtcttaaatcactcgaataccttgacttgagcttcaatcagatagccagactgccttctggtctccctgtctctcttctaactctctacttagacaacaataagatcagcaacatccctgatgagtatttcaagcgttttaatgcattgcagtatctgcgtttatctcacaacgaactggctgatagtggaatacctggaaattctttcaatgtgtcatccctggttgagctggatctgtcctataacaagcttaaaaacataccaactgtcaatgaaaaccttgaaaactattacctggaggtcaatcaacttgagaagtttgacataaagagcttctgcaagatcctggggccattatcctactccaagatcaagcatttgcgtttggatggcaatcgcatctcagaaaccagtcttccaccggatatgtatgaatgtctacgtgttgctaacgaagtcactcttaattaatatctgtatcctggaacaatattttatggttatgtttttctgtgtgtcagttttcatagtatccatattttattactgtttattacttccatgaattttaaaatctgagggaaatgttttgtaaacatttattttttttaaagaaaagatgaaaggcaggcctatttcatcacaagaacacacacatatacacgaatagacatcaaactcaatgctttatttgtaaatttagtgtttttttatttctactgtcaaatgatgtgcaaaaccttttactggttgcatggaaatcagccaagttttataatccttaaatcttaatgttcctcaaagcttggattaaatacatatggatgttactctcttgcaccaaattatcttgatacattcaaatttgtctggttaaaaaataggtggtagatattgaggccaagaatattgcaaaatacatgaagcttcatgcacttaaagaagtatttttagaataagaatttgcatacttacctagtgaaacttttctagaattatttttcactctaagtcatgtatgtttctctttgattatttgcatgttatgtttaataagctactagcaaaataaaacatagcaaatgaaaaaaaaaaaaaaaaaaaaaaaaaaaaaaaa

SEQ ID NO: 178 - DNA, 5645 bp, Homo sapiens
cgtccaccgtggagtctctccttgctttgggtccactgagccccacacattgttgagtgtctgattgtctccttgcccttacaggacaggaaagcgaaatctctgttcctttgtagggacctttcttttgtaggtgaaagggacagaaatatgattctggcctccttgatggtgaatacaggaacactttcagataaattacaatagagaggagtcagcttatttaaacaaactgaggttaagccagagattgcagttaacagtgaaaaaatttaaagcaagtacctggatggatgcaaagcagtgcccaggagacccaacttacgtgacagagatgatcattgtcactcattcattatgttttgagcaccagccatgtgccaggtccagaactagaagaaacttgggtgtaggtgagatcataggaacagtccctgccccagctgaacatcaggaagccagactgggagcacatgccgtggctgactaggactccagcagggacctggggttccatcagatcagtgtaaagcgatggtttcccaaatgagacctctccagagatggttcattccaccccgcaatggccaccagaaacattgtgctgaccagagggcttcactgccccaaaccccaaaatcacactccaggatgagaaacctaaaagtctatcttgatgaggcttcatagctggaaaccacccctcatggatccacaggctgcatttgatgaaaggagactccaggaagtcgagccattccaggcagacatgtagcaaaagcccgagctggggtccgccctcatgcaataaataacacctgtgcacataagagaggtgacaggcagggcatccctggggacctgggcctgtggcacgtgaagaaacacccaagagagcacgaagtcccaatgccatgaccagatatttcggtgccaggcatgcttctgggtcccagcaaaagacacacaaatccgtgtccttggggacccacagtctagtgacctagggctggccgggtcgcacgcttcttttcaagggctcgaaagcctctgcatggatgcaactttgggggaaaagtaaccctaaccctctgcttctctcatcctcccctcttctgtgtatatgtctgtctctttctctctgtgtgtgcccttccccactcccatccccattcctttttttatttattatattttggtggtgtgtggctcggtttctgttggtcccctcgtgtggcccctcccctgctgcagaactcgtccagctcggcctcctccgaagcctcggaaacctgccagtcagtgagcgagtgcagctcccccacctctgtcagctcgggctccaccatgggtgcctgggtgtccacagagaaggtgaccgcccgggtggcagccacagcggccccactctccctggtccccctgcctgctgctcagacagccctcacagccgcggcaacctggaagctcagaatcgacaccaagagtggggctcctcttggggacagagggtgggacaaggctgagagcattttctagaatgagtgcctggctgctggacaatgaccacatggttgtctcaagggagaggaaggggtatggggaatttggaggtgtgaaggctttctcccagaccaggtgttgcgtgcctgtccatcctcctccctcccttcccgagccacccaccagaccgttggatgagccatgtcactgtgtcagaggctgtgtgcttttccgctttttagtttgcacccccacccccctgcccttgattgagaatgtgctcctgagcaatgcgacgattttggaaacctagaatgaacagattcatttgaagatgctttggaatttttaaatttgcataatgaaatgagcaaatcactatcaccattaaatgaggcttcattagttacattatcaaaaaccattgacaaggccacaaattgagggcactgatcaatttccaaacttctaaaacgtaggtcaaacatagatgcttatttgctgtcaaactcatgtgcattctttgcaccccggctcttttctcttgcatcacagatcatccgtgagcagcagagccccaatgtttgttttatttataaatattcaggtttcccctcccttgaatgtcaatgccattttgtatctccgcactcatcctgttatattaattttttttcctttcccccccctttttttgtttgtttccagttgtctaacgggttttctcactatagtttatcaagtgagtcccacgtggggcccacgggtgcaggccttttccctcattgcctgcctgcctcccgcctgctccctcgggtcacctctgtccaccttccagactacgctcattattacaccattgggcccggcatgttcccgtcatctcagatccctagctggaaggactgggctaagcctgggccctatgaccagcctctggtgaacaccctgcagcgccgcaaagagaagcgagaaccggaccccaacgggggaggacccactaccgccagcggcccacctgcagcagctgaggaggctcagagaccacggagcatgactgtatcggctgccaccaggcctggtgaggagatggaggcttgtgaggagctggccctggccctgtctcggggcctgcagctggacacccagaggagcagccgggactcgcttcagtgctccagcggctacagcacccagacaaccaccccctgctgctctgaggacaccatcccttcccaagtttcagattatgattatttctctgtaagtggtgaccaggaggcagatcagcaggagttcgacaagtcctccaccattccaagaaacagcgacatcagccagtcctaccgacggatgttccaagccaagcgtccagcctcaactgctggcctccccaccaccctgggacctgctatggtcactccaggggttgcaactatccgacggaccccttccaccaagccttctgtccgccggggaaccattggagctggtcccatccccatcaagacacccgtgatccctgtcaagaccccaaccgtcccagacctcccaggggtgttgccagcccctccagatgggccagaagagcggggggagcacagccctgagtcgccatctgtgggtgagggcccccaaggtgtcaccagcatgccctcctcaatgtggagcggccaagcttccgttaaccctccacttccaggcccgaagcccagtatccctgaggagcacagacaggcaattccagaaagtgaagctgaagaccaggaacgggaacccccaagtgccactgtctccccaggccagattccagagagtgaccctgcagacctgagcccaagggatactccacaaggagaagacatgctgaacgccatccgaaggggcgtgaaactgaagaagaccacgacaaacgatcgctcagcccctcgcttttcttaggttcacaagaaatgcgccggtggggaatgaactgtttcattaataaaacctaatttgtcttgatccattccactctataataaaacaaaagattttgtaggcaactcggaatatagctcttttgaaagtactcgacacctttagataagaattaaaaccaacctatgtaactgacataatcttgatcttttaatttgtaaatattgacaattttctttctgcacattttaatcttagtttcccttttgatttttctgaaggtgccaaattccatttaacttttttacaagtctttgtaaaattttaaatgcataaagggggttggggcaggggaaccacgaagtagttaattttagaaaaggatttactatacttcactcttctttttttttccccacaagcttttgtagatgcattgtagtagtctagcttagaagcaaatgcaagttattttaatgtacaaactaaatgggtaagaggtaaaatcttcatttaaatatactatgttctggatgaaaagagcaggagtaacaattgatgagcaatattcagagtgaagtaaatctggaaatggtagactgtgttgggattggggggagggccatgggaggggtacatcgtcaacatagccgatcctgttacatttaagagtagcctcgtaggttgaatttcttctggtagcttcatggtaaatgcatccgaataagccatactggattgcagtgtttgtttctgtagggtgtttaaggacttgacttcctttctcccatgattcctctggactgcacacagcacccacaaccagccccatgcatgctgctgcctctgggcagtcgtagaatctcccacttcagtttctcgttgattgtactcacctttatggaatccaaatacatccaaaagggtaaggcagttttaaaaatgtgaaaacatttaaaaatgataatagcagggaattcttagattatagtaaatgccttttacttaactgtgcccagcaggctgggtgcgttaaaaagcccaagtattttgaaaaaactcgaacagatttgacaagggtagccagcttggagtctagcaacttgccaatgtgtttaccaatctgggggcttgtttttcttttcttctttcaaataaatggcagttaactggctttacagtaaacattgaagagaggaggatttgtttattgtcactgggaatctgaccactatactgtcctttttttgtattctgggtaatgttttttggaaaagatttgtcttttctaagtggaagttaaatttgttatactgcccatcccctaaagccaacagagatttgtagatttaaagggatcacatttgaagacaatagtgtttaagaaagcaagcaagtcccttagcagtcaggtcataacagggcacatttctgaccgaaccctctcaaggcagaggaggagtttggtgggtttcatacaccctgcagattcctgttggctctaaccctcaattacctaatcttatgctttaacacataactgcattggatgtgagagtaacgtaccgtatggtcattgttctatatattaacattgaacactgctgcgattgctcaaggacattttatgttacggctttaaagcaaaggcatgattattagaaactatttaagcttttttctttgaaaaacaagcttcttttacagaatataaacaacagtagtgcctgtggtttagcccaccaatcttgatgactaaaagtagctgatgcattgtgcatatgatgcttgagatggtttttgcaaaagcagaaatcgctgcaaggtaatcacaatagataaaagtggtattttaaacctttgaaataaatggatgtaactgtaccttggtacagcttttcacttgtttagtttttaaacgttagtataatctgaataaataaaatgttgccaaattcaatgtagaaagaatgtgacaacacaccttgggtagttctgcttgtgtttttgcatattgtaaaagcagtgtcacagctaaaaagaaagaaatcgtttctaacagtaaattattgtgctttagttgctagtttgtactgagagttgacctctccctgtgcagttttttgttctaaacttgtataaataacaattgtgtaatgtgtctccctcctacattgtaacaattgcttcagcctacgttataaataaagaaccactagatt

SEQ ID NO: 179 - DNA, 1464 bp, Homo sapiens
ctccccgcgccgccccgcgcaggcgcccccgccccgccgtcgccgccgccgcagccaggagccgctgcaccatgccccgcatagatgcggacctcaagctcgacttcaaggacgtcctgctccgacctaagcggagcagcctcaagagccgagccgaggtggatcttgaacgcaccttcacgtttcgaaattcaaagcagacctactcagggattcccatcatcgtggccaacatggacactgtgggcacgtttgagatggcagccgtgatgtcacagcactccatgtttacagcaattcataagcattactccctggatgactggaagctctttgccacaaatcacccagaatgcctgcagaatgtagccgtgagttcaggcagtgggcagaatgatctggaaaagatgaccagcatcctggaagctgtgccacaggttaagtttatttgcctggatgtggccaatgggtattcagaacattttgtggaattcgtgaaacttgtccgtgccaaatttcctgaacacaccattatggcagggaacgtggtgacaggagaaatggtagaagagcttattctttccggagcagatatcatcaaagtgggagttggaccaggttctgtgtgcaccacccgcaccaagacgggagtggggtacccccagctgagtgccgtcattgagtgtgccgactctgcccacggcctgaagggccacatcatctctgatggaggctgtacgtgtccaggggatgtcgccaaagcctttggaactggagcagattttgtcatgctgggaggaatgttttcgggtcatacggagtgtgctggagaagtgattgagaggaacggacggaagctcaagctcttctacgggatgagctctgacaccgccatgaacaagcacgcaggaggagttgctgagtacagagcctctgagggtaagactgtggaagttccttacaaaggagatgtggaaaacactatcctggatattctcgggggactgaggtccacgtgcacctacgtgggggccgccaaactcaaggagctcagcaggagggcaacattcatccgggtgacccagcagcacaacaccgtgttcagctaaccctggggacaaagcagcgtctggctcgatggaagcgtccaaacctgcttttcccatctccccccaagtctgttccgtcagagcttctggctgctcctgaatggtggaatgcctgtgtcctctcttctgtctcctgccgcctggaggcttcggggctctcccgcctgccttctcggggcccagacgcaaggcaccgattgggccaacatcagagccctgctgcccagaactcataacctcattgttcaaaccaacacttgcacctttctctttttctctttctctctccctttctttgtttttctttcttttttaaaagaagatggtttcagctttaatataatgctattatctt

SEQ ID NO: 180 - DNA, 1246 bp, Homo sapiens
gaccagcctacagccgcctgcatctgtatccagcgccaggtcccgccagtcccagctgcgcgcgccccccagtcccgcacccgttcggcccaggctaagttagccctcaccatgccggtcaaaggaggcaccaagtgcatcaaatacctgctgttcggatttaacttcatcttctggcttgccgggattgctgtccttgccattggactatggctccgattcgactctcagaccaagagcatcttcgagcaagaaactaataataataattccagcttctacacaggagtctatattctgatcggagccggcgccctcatgatgctggtgggcttcctgggctgctgcggggctgtgcaggagtcccagtgcatgctgggactgttcttcggcttcctcttggtgatattcgccattgaaatagctgcggccatctggggatattcccacaaggatgaggtgattaaggaagtccaggagttttacaaggacacctacaacaagctgaaaaccaaggatgagccccagcgggaaacgctgaaagccatccactatgcgttgaactgctgtggtttggctgggggcgtggaacagtttatctcagacatctgccccaagaaggacgtactcgaaaccttcaccgtgaagtcctgtcctgatgccatcaaagaggtcttcgacaataaattccacatcatcggcgcagtgggcatcggcattgccgtggtcatgatatttggcatgatcttcagtatgatcttgtgctgtgctatccgcaggaaccgcgagatggtctagagtcagcttacatccctgagcaggaaagtttacccatgaagattggtgggattttttgtttgtttgttttgttttgtttgttgtttgttgtttgtttttttgccactaattttagtattcattctgcattgctagataaaagctgaagttactttatgtttgtcttttaatgcttcattcaatattgacatttgtagttgagcggggggtttggtttgctttggtttatattttttcagttgtttgtttttgcttgttatattaagcagaaatcctgcaatgaaaggtactatatttgctagactctagacaagatattgtacataaaagaatttttttgtctttaaatagatacaaatgtctatcaactttaatcaagttgtaacttatattgaagacaatttgatacataataaaaaattatgacaatgtcaaaaaaaaaaaaaaa

SEQ ID NO: 181 - DNA, 5060 bp, Homo sapiens
acgcagagcgctgctgggctgccgggtctcccgcttcctcctcctgctccaagggcctcctgcatgagggcgcggtagagacccggacccgcgccgtgctcctgccgtttcgctgcgctccgcccgggcccggctcagccaggccccgcggtgagccatgattcgcctcggggctccccagtcgctggtgctgctgacgctgctcgtcgccgctgtccttcggtgtcagggccaggatgtccaggaggctggcagctgtgtgcaggatgggcagaggtataatgataaggatgtgtggaagccggagccctgccggatctgtgtctgtgacactgggactgtcctctgcgacgacataatctgtgaagacgtgaaagactgcctcagccctgagatccccttcggagagtgctgccccatctgcccaactgacctcgccactgccagtgggcaaccaggaccaaagggacagaaaggagaacctggagacatcaaggatattgtaggacccaaaggacctcctgggcctcagggacctgcaggggaacaaggacccagaggggatcgtggtgacaaaggtgaaaaaggtgcccctggacctcgtggcagagatggagaacctgggacccctggaaatcctggcccccctggtcctcccggcccccctggtccccctggtcttggtggaaactttgctgcccagatggctggaggatttgatgaaaaggctggtggcgcccagttgggagtaatgcaaggaccaatgggccccatgggacctcgaggacctccaggccctgcaggtgctcctgggcctcaaggatttcaaggcaatcctggtgaacctggtgaacctggtgtctctggtcccatgggtccccgtggtcctcctggtccccctggaaagcctggtgatgatggtgaagctggaaaacctggaaaagctggtgaaaggggtccgcctggtcctcagggtgctcgtggtttcccaggaaccccaggccttcctggtgtcaaaggtcacagaggttatccaggcctggacggtgctaagggagaggcgggtgctcctggtgtgaagggtgagagtggttccccgggtgagaacggatctccgggcccaatgggtcctcgtggcctgcctggtgaaagaggacggactggccctgctggcgctgcgggtgcccgaggcaacgatggtcagccaggccccgcaggtcctccgggtcctgtcggtcctgctggtggtcctggcttccctggtgctcctggagccaagggtgaagccggccccactggtgcccgtggtcctgaaggtgctcaaggtcctcgcggtgaacctggtactcctgggtcccctgggcctgctggtgcctccggtaaccctggaacagatggaattcctggagccaaaggatctgctggtgctcctggcattgctggtgctcctggcttccctgggccacggggtcctcctggccctcaaggtgcaactggtcctctgggcccgaaaggtcagacgggtgaacctggtattgctggcttcaaaggtgaacaaggccccaagggagaacctggccctgctggcccccagggagcccctggacccgctggtgaagaaggcaagagaggtgcccgtggagagcctggtggcgttgggcccatcggtccccctggagaaagaggtgctcccggaaaccgcggtttcccaggtcaagatggtctggcaggtcccaagggagcccctggagagcgagggcccagtggtcttgctggccccaagggagccaacggtgaccctggccgtcctggagaacctggccttcctggagcccggggtctcactggccgccctggtgatgctggtcctcaaggcaaagttggcccttctggagcccctggtgaagatggtcgtcctggacctccaggtcctcagggggctcgtgggcagcctggtgtcatgggtttccctggccccaaaggtgccaacggtgagcctggcaaagctggtgagaagggactgcctggtgctcctggtctgaggggtcttcctggcaaagatggtgagacaggtgctgcaggaccccctggccctgctggacctgctggtgaacgaggcgagcagggtgctcctgggccatctgggttccagggacttcctggccctcctggtcccccaggtgaaggtggaaaaccaggtgaccagggtgttcccggtgaagctggagcccctggcctcgtgggtcccaggggtgaacgaggtttcccaggtgaacgtggctctcccggtgcccagggcctccagggtccccgtggcctccccggcactcctggcactgatggtcccaaaggtgcatctggcccagcaggcccccctggcgcacagggccctccaggtcttcagggaatgcctggcgagaggggagcagctggtatcgctgggcccaaaggcgacaggggtgacgttggtgagaaaggccctgagggagcccctggaaaggatggtggacgaggcctgacaggtcccattggcccccctggcccagctggtgctaacggcgagaagggagaagttggacctcctggtcctgcaggaagtgctggtgctcgtggcgctccgggtgaacgtggagagactggcccccccggaccagcgggatttgctgggcctcctggtgctgatggccagcctggggccaagggtgagcaaggagaggccggccagaaaggcgatgctggtgcccctggtcctcagggcccctctggagcacctgggcctcagggtcctactggagtgactggtcctaaaggagcccgaggtgcccaaggccccccgggagccactggattccctggagctgctggccgcgttggacccccaggctccaatggcaaccctggaccccctggtccccctggtccttctggaaaagatggtcccaaaggtgctcgaggagacagcggcccccctggccgagctggtgaacccggcctccaaggtcctgctggaccccctggcgagaagggagagcctggagatgacggtccctctggtgccgaaggtccaccaggtccccagggtctggctggtcagagaggcatcgtcggtctgcctgggcaacgtggtgagagaggattccctggcttgcctggcccatcgggtgagcccggcaagcagggtgctcctggagcatctggagacagaggtcctcctggccccgtgggtcctcctggcctgacgggtcctgcaggtgaacccggacgagagggaagccccggtgctgatggcccccctggcagagatggcgctgctggagtcaagggtgatcgtggtgagactggtgctgtgggagctcctggagcccctgggccccctggctcccctggccccgctggtccaactggcaagcaaggagacagaggagaagctggtgcacaaggccccatgggaccctcaggaccagctggagcccggggaatccagggtcctcaaggccccagaggtgacaaaggagaggctggagagcctggcgagagaggcctgaagggacaccgtggcttcactggtctgcagggtctgcccggccctcctggtccttctggagaccaaggtgcttctggtcctgctggtccttctggccctagaggtcctcctggccccgtcggtccctctggcaaagatggtgctaatggaatccctggccccattgggcctcctggtccccgtggacgatcaggcgaaaccggtcctgctggtcctcctggaaatcctgggccccctggtcctccaggtccccctggccctggcatcgacatgtccgcctttgctggcttaggcccgagagagaagggccccgaccccctgcagtacatgcgggccgaccaggcagccggtggcctgagacagcatgacgccgaggtggatgccacactcaagtccctcaacaaccagattgagagcatccgcagccccgagggctcccgcaagaaccctgctcgcacctgcagagacctgaaactctgccaccctgagtggaagagtggagactactggattgaccccaaccaaggctgcaccttggacgccatgaaggttttctgcaacatggagactggcgagacttgcgtctaccccaatccagcaaacgttcccaagaagaactggtggagcagcaagagcaaggagaagaaacacatctggtttggagaaaccatcaatggtggcttccatttcagctatggagatgacaatctggctcccaacactgccaacgtccagatgaccttcctacgcctgctgtccacggaaggctcccagaacatcacctaccactgcaagaacagcattgcctatctggacgaagcagctggcaacctcaagaaggccctgctcatccagggctccaatgacgtggagatccgggcagagggcaatagcaggttcacgtacactgccctgaaggatggctgcacgaaacataccggtaagtggggcaagactgttatcgagtaccggtcacagaagacctcacgcctccccatcattgacattgcacccatggacataggagggcccgagcaggaattcggtgtggacatagggccggtctgcttcttgtaaaaacctgaacccagaaacaacacaatccgttgcaaacccaaaggacccaagtactttccaatctcagtcactctaggactctgcactgaatggctgacctgacctgatgtccattcatcccaccctctcacagttcggacttttctcccctctctttctaagagacctgaactgggcagactgcaaaataaaatctcggtgttctatttatttattgtcttcctgtaagaccttcgggtcaaggcagaggcaggaaactaactggtgtgagtcaaatgccccctgagtgactgcccccagcccaggccagaagacctcccttcaggtgccgggcgcaggaactgtgtgtgtcctacacaatggtgctattctgtgtcaaacacctctgtattttttaaaacatcaattgatattaaaaatgaaaagattattggaaagt

SEQ ID NO: 182 - DNA, 1722 bp, Homo sapiens
ggggaaaagagctaggaaagagctgcaaagcagtgtgggctttttccctttttttgctccttttcattacccctcctccgttttcacccttctccggacttcgcgtagaacctgcgaatttcgaagaggaggtggcaaagtgggagaaaagaggtgttagggtttggggtttttttgtttttgtttttgttttttaatttcttgatttcaacattttctcccaccctctcggctgcagccaacgcctcttacctgttctgcggcgccgcgcaccgctggcagctgagggttagaaagcggggtgtattttagattttaagcaaaaattttaaagataaatccatttttctctcccacccccaacgccatctccactgcatccgatctcattatttcggtggttgcttgggggtgaacaattttgtggctttttttcccctataattctgacccgctcaggcttgagggtttctccggcctccgctcactgcgtgcacctggcgctgccctgcttcccccaacctgttgcaaggctttaattcttgcaactgggacctgctcgcaggcaccccagccctccacctctctctacatttttgcaagtgtctgggggagggcacctgctctacctgccagaaattttaaaacaaaaacaaaaacaaaaaaatctccgggggccctcttggcccctttatccctgcactctcgctctcctgccccaccccgaggtaaagggggcgactaagagaagatggtgttgctcaccgcggtcctcctgctgctggccgcctatgcggggccggcccagagcctgggctccttcgtgcactgcgagccctgcgacgagaaagccctctccatgtgcccccccagccccctgggctgcgagctggtcaaggagccgggctgcggctgctgcatgacctgcgccctggccgaggggcagtcgtgcggcgtctacaccgagcgctgcgcccaggggctgcgctgcctcccccggcaggacgaggagaagccgctgcacgccctgctgcacggccgcggggtttgcctcaacgaaaagagctaccgcgagcaagtcaagatcgagagagactcccgtgagcacgaggagcccaccacctctgagatggccgaggagacctactcccccaagatcttccggcccaaacacacccgcatctccgagctgaaggctgaagcagtgaagaaggaccgcagaaagaagctgacccagtccaagtttgtcgggggagccgagaacactgcccacccccggatcatctctgcacctgagatgagacaggagtctgagcagggcccctgccgcagacacatggaggcttccctgcaggagctcaaagccagcccacgcatggtgccccgtgctgtgtacctgcccaattgtgaccgcaaaggattctacaagagaaagcagtgcaaaccttcccgtggccgcaagcgtggcatctgctggtgcgtggacaagtacgggatgaagctgccaggcatggagtacgttgacggggactttcagtgccacaccttcgacagcagcaacgttgagtgatgcgtccccccccaacctttccctcaccccctcccacccccagccccgactccagccagcgcctccctccaccccaggacgccactcatttcatctcatttaagggaaaaatatatatctatctatttgaggaaaaaaaaaaaaaaaaaaaa

SEQ ID NO: 183 - DNA, 2390 bp, Homo sapiens
ccagcctcggagggagggattagaagccgctagactttttttcctcccctctcagtagcacggagtccgaattaattggatttcattcactggggaggaacaaaaactatctgggcagcttcattgagagagattcattgacactaagagccagcgctgcagctggtgcagagagaacctccggctttgacttctgtctcgtctgccccaaggccgctagcctcggcttgggaaggcgaggcggaattaaaccccgctccgagagcgcacgttcgcgcgcggtgcgtcggccattgcctgccccgaggggcgtctggtaggcaccccgccctctcccgcagctcgacccccatgatagatacgctcagacccgtgcccttcgcgtcggaaatggcgatcagcaagacggtggcgtggctcaacgagcagctggagctgggcaacgagcggctgctgctgatggactgccggccgcaggagctatacgagtcgtcgcacatcgagtcggccatcaacgtggccatcccgggcatcatgctgcggcgcctgcagaagggtaacctgccggtgcgcgcgctcttcacgcgcggcgaggaccgggaccgcttcacccggcgctgtggcaccgacacagtggtgctctacgacgagagcagcagcgactggaacgagaatacgggcggcgagtcgttgctcgggctgctgctcaagaagctcaaggacgagggctgccgggcgttctacctggaaggtggcttcagtaagttccaagccgagttctccctgcattgcgagaccaatctagacggctcgtgtagcagcagctcgccgccgttgccagtgctggggctcgggggcctgcggatcagctctgactcttcctcggacatcgagtctgaccttgaccgagaccccaatagtgcaacagactcggatggtagtccgctgtccaacagccagccttccttcccagtggagatcttgcccttcctctacttgggctgtgccaaagactccaccaacttggacgtgttggaggaattcggcatcaagtacatcttgaacgtcacccccaatttgccgaatctctttgagaacgcaggagagtttaaatacaagcaaatccccatctcggatcactggagccaaaacctgtcccagtttttccctgaggccatttctttcatagatgaagcccggggcaagaactgtggtgtcttggtacattgcttggctggcattagccgctcagtcactgtgactgtggcttaccttatgcagaagctcaatctgtcgatgaacgatgcctatgacattgtcaaaatgaaaaaatccaacatatcccctaacttcaacttcatgggtcagctgctggacttcgagaggacgctgggactcagcagcccatgtgacaacagggttccagcacagcagctgtattttaccaccccttccaaccagaatgtataccaggtggactctctgcaatctacgtgaaagaccccacacccctccttgctggaatgtgtctggcccttcagcagtttctcttggcagcatcagctgggctgctttctttgtgtgtggccccaggtgtcaaaatgacaccagctgtctgtactagacaaggttaccaagtgcggaattggttaatactaacagagagatttgctccattctctttggaataacaggacatgctgtatagatacaggcagtaggtttgctctgtacccatgtgtacagcctacccatgcagggactgggattcgaggacttccaggcgcatagggtagaaccaaatgatagggtaggagcatgtgttctttagggccttgtaaggctgtttccttttgcatctggaactgactatataattgtcttcaagtgaagactaattcaattttgcatatagaggagccaaagagagatttcagctctgtatttgtggtatcagtgttggaaaagagaaatctgatactccatttggattattgtaaatatttgatcttgaatcacttgacagtgtttgtttgaattgtgtttgttttttcctttgatgggcttaaaagaaattatccaaagggagaaagagcagtatgccacttcttaaaacagaacaaaacaaaaaaagaaaattgtgctctgttgtaatccaaaggggagatttgcagcatgcttgactttaccaattctgatgacatctttacggacactattatcactaagaccttgttatggcgaagtctttagtctttttcatgtattttcctcatgattttttctctttatgtagtttgagtatgccttacctttgtaaatatttttgcttgtgttgtcgcaaaggggataatctgggaaagacaccaaatcatgggctcactttaaaa

SEQ ID NO: 184 - DNA, 3769 bp, Homo sapiens
ggcggcggaggcagcagtcttagaatgagtagcaatatccacgcgaaccatctcagcctagacgcgtcctcctcctcctcctcctcctcttcctcttcttcttcttcctcctcctcttcctcctcgtcctcggtccacgagcccaagatggatgcgctcatcatcccggtgaccatggaggtgccgtgcgacagccggggccaacgcatgtggtgggctttcctggcctcctccatggtgactttcttcgggggcctcttcatcatcttgctctggcggacgctcaagtacctgtggaccgtgtgctgccactgcgggggcaagacgaaggaggcccagaagattaacaatggctcaagccaggcggatggcactctcaaaccagtggatgaaaaagaggaggcagtggccgccgaggtcggctggatgacctccgtgaaggactgggcgggggtgatgatatccgcccagacactgactggcagagtcctggttgtcttagtctttgctctcagcatcggtgcacttgtaatatacttcatagattcatcaaacccaatagaatcctgccagaatttctacaaagatttcacattacagatcgacatggctttcaacgtgttcttccttctctacttcggcttgcggtttattgcagccaacgataaattgtggttctggctggaagtgaactctgtagtggatttcttcacggtgccccccgtgtttgtgtctgtgtacttaaacagaagttggcttggtttgagatttttaagagctctgagactgatacagttttcagaaattttgcagtttctgaatattcttaaaacaagtaattccatcaagctggtgaatctgctctccatatttatcagcacgtggctgactgcagccgggttcatccatttggtggagaattcaggggacccatgggaaaatttccaaaacaaccaggctctcacctactgggaatgtgtctatttactcatggtcacaatgtccaccgttggttatggggatgtttatgcaaaaaccacacttgggcgcctcttcatggtcttcttcatcctcgggggactggccatgtttgccagctacgtccctgaaatcatagagttaataggaaaccgcaagaaatacgggggctcctatagtgcggttagtggaagaaagcacattgtggtctgcggacacatcactctggagagtgtttccaacttcctgaaggactttctgcacaaggaccgggatgacgtcaatgtggagatcgtttttcttcacaacatctcccccaacctggagcttgaagctctgttcaaacgacattttactcaggtggaattttatcagggttccgtcctcaatccacatgatcttgcaagagtcaagatagagtcagcagatgcatgcctgatccttgccaacaagtactgcgctgacccggatgcggaggatgcctcgaatatcatgagagtaatctccataaagaactaccatccgaagataagaatcatcactcaaatgctgcagtatcacaacaaggcccatctgctaaacatcccgagctggaattggaaagaaggtgatgacgcaatctgcctcgcagagttgaagttgggcttcatagcccagagctgcctggctcaaggcctctccaccatgcttgccaacctcttctccatgaggtcattcataaagattgaggaagacacatggcagaaatactacttggaaggagtctcaaatgaaatgtacacagaatatctctccagtgccttcgtgggtctgtccttccctactgtttgtgagctgtgttttgtgaagctcaagctcctaatgatagccattgagtacaagtctgccaaccgagagagccgtatattaattaatcctggaaaccatcttaagatccaagaaggtactttaggatttttcatcgcaagtgatgccaaagaagttaaaagggcatttttttactgcaaggcctgtcatgatgacatcacagatcccaaaagaataaaaaaatgtggctgcaaacggcttgaagatgagcagccgtcaacactatcaccaaaaaaaaagcaacggaatggaggcatgcggaactcacccaacacctcgcctaagctgatgaggcatgaccccttgttaattcctggcaatgatcagattgacaacatggactcccatgtgaagaagtacgactctactgggatgtttcactggtgtgcacccaaggagatagagaaagtcatcctgactcgaagtgaagctgccatgaccgtcctgagtggccatgtcgtggtctgcatctttggcgacgtcagctcagccctgatcggcctccggaacctggtgatgccgctccgtgccagcaactttcattaccatgagctcaagcacattgtgtttgtgggctctattgagtacctcaagcgggaatgggagacgcttcataacttccccaaagtgtccatattgcctggtacgccattaagtcgggctgatttaagggctgtcaacatcaacctctgtgacatgtgcgttatcctgtcagccaatcagaataatattgatgatacttcgctgcaggacaaggaatgcatcttggcgtcactcaacatcaaatctatgcagtttgatgacagcatcggagtcttgcaggctaattcccaagggttcacacctccaggaatggatagatcctctccagataacagcccagtgcacgggatgttacgtcaaccatccatcacaactggggtcaacatccccatcatcactgaactagtgaacgatactaatgttcagtttttggaccaagacgatgatgatgaccctgatacagaactgtacctcacgcagccctttgcctgtgggacagcatttgccgtcagtgtcctggactcactcatgagcgcgacgtacttcaatgacaatatcctcaccctgatacggaccctggtgaccggaggagccacgccggagctggaggctctgattgctgaggaaaacgcccttagaggtggctacagcaccccgcagacactggccaatagggaccgctgccgcgtggcccagttagctctgctcgatgggccatttgcggacttaggggatggtggttgttatggtgatctgttctgcaaagctctgaaaacatataatatgctttgttttggaatttaccggctgagagatgctcacctcagcacccccagtcagtgcacaaagaggtatgtcatcaccaacccgccctatgagtttgagctcgtgccgacggacctgatcttctgcttaatgcagtttgaccacaatgccggccagtcccgggccagcctgtcccattcctcccactcgtcgcagtcctccagcaagaagagctcctctgttcactccatcccatccacagcaaaccgacagaaccggcccaagtccagggagtcccgggacaaacagaagtacgtgcaggaagagcggctttgatatgtgtatccaccgccactgtgtgaaactgtatctgccactcatttccccagttggtgtttccaacaaagtaactttccctgttttcccctgtagtccccccctttttttttacacatatttgcatatgtatgatagtgtgcatgtggttgtcatttttatttcaccaccataaaacccttgagcacaacagcaaataagcaggacgggcccaaagttatttatgattctggggggaaaataacccaaaggcatgctccagacataaatagctcactgc

SEQ ID NO: 185 - DNA, 5084 bp, Homo sapiens
gatcccatcgcagctaccgcgatgagaggcgctcgcggcgcctgggattttctctgcgttctgctcctactgcttcgcgtccagacaggctcttctcaaccatctgtgagtccaggggaaccgtctccaccatccatccatccaggaaaatcagacttaatagtccgcgtgggcgacgagattaggctgttatgcactgatccgggctttgtcaaatggacttttgagatcctggatgaaacgaatgagaataagcagaatgaatggatcacggaaaaggcagaagccaccaacaccggcaaatacacgtgcaccaacaaacacggcttaagcaattccatttatgtgtttgttagagatcctgccaagcttttccttgttgaccgctccttgtatgggaaagaagacaacgacacgctggtccgctgtcctctcacagacccagaagtgaccaattattccctcaaggggtgccaggggaagcctcttcccaaggacttgaggtttattcctgaccccaaggcgggcatcatgatcaaaagtgtgaaacgcgcctaccatcggctctgtctgcattgttctgtggaccaggagggcaagtcagtgctgtcggaaaaattcatcctgaaagtgaggccagccttcaaagctgtgcctgttgtgtctgtgtccaaagcaagctatcttcttagggaaggggaagaattcacagtgacgtgcacaataaaagatgtgtctagttctgtgtactcaacgtggaaaagagaaaacagtcagactaaactacaggagaaatataatagctggcatcacggtgacttcaattatgaacgtcaggcaacgttgactatcagttcagcgagagttaatgattctggagtgttcatgtgttatgccaataatacttttggatcagcaaatgtcacaacaaccttggaagtagtagataaaggattcattaatatcttccccatgataaacactacagtatttgtaaacgatggagaaaatgtagatttgattgttgaatatgaagcattccccaaacctgaacaccagcagtggatctatatgaacagaaccttcactgataaatgggaagattatcccaagtctgagaatgaaagtaatatcagatacgtaagtgaacttcatctaacgagattaaaaggcaccgaaggaggcacttacacattcctagtgtccaattctgacgtcaatgctgccatagcatttaatgtttatgtgaatacaaaaccagaaatcctgacttacgacaggctcgtgaatggcatgctccaatgtgtggcagcaggattcccagagcccacaatagattggtatttttgtccaggaactgagcagagatgctctgcttctgtactgccagtggatgtgcagacactaaactcatctgggccaccgtttggaaagctagtggttcagagttctatagattctagtgcattcaagcacaatggcacggttgaatgtaaggcttacaacgatgtgggcaagacttctgcctattttaactttgcatttaaaggtaacaacaaagagcaaatccatccccacaccctgttcactcctttgctgattggtttcgtaatcgtagctggcatgatgtgcattattgtgatgattctgacctacaaatatttacagaaacccatgtatgaagtacagtggaaggttgttgaggagataaatggaaacaattatgtttacatagacccaacacaacttccttatgatcacaaatgggagtttcccagaaacaggctgagttttgggaaaaccctgggtgctggagctttcgggaaggttgttgaggcaactgcttatggcttaattaagtcagatgcggccatgactgtcgctgtaaagatgctcaagccgagtgcccatttgacagaacgggaagccctcatgtctgaactcaaagtcctgagttaccttggtaatcacatgaatattgtgaatctacttggagcctgcaccattggagggcccaccctggtcattacagaatattgttgctatggtgatcttttgaattttttgagaagaaaacgtgattcatttatttgttcaaagcaggaagatcatgcagaagctgcactttataagaatcttctgcattcaaaggagtcttcctgcagcgatagtactaatgagtacatggacatgaaacctggagtttcttatgttgtcccaaccaaggccgacaaaaggagatctgtgagaataggctcatacatagaaagagatgtgactcccgccatcatggaggatgacgagttggccctagacttagaagacttgctgagcttttcttaccaggtggcaaagggcatggctttcctcgcctccaagaattgtattcacagagacttggcagccagaaatatcctccttactcatggtcggatcacaaagatttgtgattttggtctagccagagacatcaagaatgattctaattatgtggttaaaggaaacgctcgactacctgtgaagtggatggcacctgaaagcattttcaactgtgtatacacgtttgaaagtgacgtctggtcctatgggatttttctttgggagctgttctctttaggaagcagcccctatcctggaatgccggtcgattctaagttctacaagatgatcaaggaaggcttccggatgctcagccctgaacacgcacctgctgaaatgtatgacataatgaagacttgctgggatgcagatcccctaaaaagaccaacattcaagcaaattgttcagctaattgagaagcagatttcagagagcaccaatcatatttactccaacttagcaaactgcagccccaaccgacagaagcccgtggtagaccattctgtgcggatcaattctgtcggcagcaccgcttcctcctcccagcctctgcttgtgcacgacgatgtctgagcagaatcagtgtttgggtcacccctccaggaatgatctcttcttttggcttccatgatggttattttcttttctttcaacttgcatccaactccaggatagtgggcaccccactgcaatcctgtctttctgagcacactttagtggccgatgatttttgtcatcagccaccatcctattgcaaaggttccaactgtatatattcccaatagcaacgtagcttctaccatgaacagaaaacattctgatttggaaaaagagagggaggtatggactgggggccagagtcctttccaaggcttctccaattctgcccaaaaatatggttgatagtttacctgaataaatggtagtaatcacagttggccttcagaaccatccatagtagtatgatgatacaagattagaagctgaaaacctaagtcctttatgtggaaaacagaacatcattagaacaaaggacagagtatgaacacctgggcttaagaaatctagtatttcatgctgggaatgagacataggccatgaaaaaaatgatccccaagtgtgaacaaaagatgctcttctgtggaccactgcatgagcttttatactaccgacctggtttttaaatagagtttgctattagagcattgaattggagagaaggcctccctagccagcacttgtatatacgcatctataaattgtccgtgttcatacatttgaggggaaaacaccataaggtttcgtttctgtatacaaccctggcattatgtccactgtgtatagaagtagattaagagccatataagtttgaaggaaacagttaataccattttttaaggaaacaatataaccacaaagcacagtttgaacaaaatctcctcttttagctgatgaacttattctgtagattctgtggaacaagcctatcagcttcagaatggcattgtactcaatggatttgatgctgtttgacaaagttactgattcactgcatggctcccacaggagtgggaaaacactgccatcttagtttggattcttatgtagcaggaaataaagtataggtttagcctccttcgcaggcatgtcctggacaccgggccagtatctatatatgtgtatgtacgtttgtatgtgtgtagacaaatatttggaggggtatttttgccctgagtccaagagggtcctttagtacctgaaaagtaacttggctttcattattagtactgctcttgtttcttttcacatagctgtctagagtagcttaccagaagcttccatagtggtgcagaggaagtggaaggcatcagtccctatgtatttgcagttcacctgcacttaaggcactctgttatttagactcatcttactgtacctgttccttagaccttccataatgctactgtctcactgaaacatttaaattttaccctttagactgtagcctggatattattcttgtagtttacctctttaaaaacaaaacaaaacaaaacaaaaaactccccttcctcactgcccaatataaaaggcaaatgtgtacatggcagagtttgtgtgttgtcttgaaagattcaggtatgttgcctttatggtttcccccttctacatttcttagactacatttagagaactgtggccgttatctggaagtaaccatttgcactggagttctatgctctcgcacctttccaaagttaacagattttggggttgtgttgtcacccaagagattgttgtttgccatactttgtctgaaaaattcctttgtgtttctattgacttcaatgatagtaagaaaagtggttgttagttatagatgtctaggtacttcaggggcacttcattgagagttttgtcttgccatactttgtctgaaaaattcctttgtgtttctattgacttcaatgatagtaagaaaagtggttgttagttatagatgtctaggtacttcaggggcacttcattgagagttttgtcaatgtcttttgaatattcccaagcccatgagtccttgaaaatattttttatatatacagtaactttatgtgtaaatacataagcggcgtaagtttaaaggatgttggtgttccacgtgttttattcctgtatgttgtccaattgttgacagttctgaagaattc

SEQ ID NO: 186 - DNA, 6537 bp, Homo sapiens
gataatctccatttttgtcatgggactgttaaaaacgtttggaagttccaattctggtcttgatttcccagttaaagatgttctttcacccgaatgcagtctttcctgttggtaaaataagacaaccatcaacattgcctgtttgtctgcttttgaatctcttaaggatggatgtttgtaagatgttgcttaatacagtctggaatactctgtccatttgttgaattgtaaatgactttcaaatgtgcaagttctgttaaatacaaagagaacctctatgggtaacttttgtgttgaagaagtcatttgtcaaccatggtaaaacttgcaaacccactttatacagagtggattcttgaagctatacagaaaataaaaaagcaaaagcaaaggccctctgaagagagaatctgccatgcggtcagtacttcccatgggttggataagaagacagtctctgaacagctggaactcagtgttcaggatggctcagttctcaaagtcaccaacaaaggccttgcctcctataaggacccagacaaccctgggcgcttttcatcagttaaaccaggcacttttcctaagtcagccaaggggtctagaggatcatgtaatgatctccgcaatgtggattggaataaacttttaaggagagcaattgaaggacttgaggagccgaatggctcctccctgaagaacatagagaagtatctcagaagtcaaagtgatctcacaagcaccaccaacaacccagcctttcagcagcggctgcgactgggggccaaacgcgctgtgaataatgggaggttactgaaagacggaccgcagtacagggtcaattatgggagcttagatggcaaaggggcacctcagtatcccagtgcattcccatcctcgctcccacctgtcagccttctaccccatgagaaagaccagccccgtgctgatcccattccaatatgtagcttctgtttggggactaaagaatcaaatcgtgaaaagaaaccagaagaactcctctcttgtgcagattgtggcagtagtggacacccatcctgtttgaaattttgtcctgaattaacaacaaatgtaaaggccttaaggtggcagtgcatcgaatgcaagacatgcagtgcctgtagagtccaaggcagaaatgctgataatatgcttttttgtgattcctgtgatagaggatttcatatggaatgctgtgacccaccactttccagaatgccaaaagggatgtggatttgccaagtctgcagaccaaagaaaaagggaagaaaactacttcatgagaaagctgcacaaataaaacgacgatatgcaaaacccattggacgaccgaaaaataaattaaagcaacgattgttgtctgtaaccagtgatgaaggatccatgaatgcattcacaggaagggggtcacctggtaggggtcaaaagactaaagtctgtaccacaccttcatctggtcatgctgcatctgggaaggactcaagcagcagattggctgttacagaccccactcggcctggtgccaccaccaaaatcaccaccacctccacctacatttctgcctctacacttaaagttaacaagaaaaccaaagggctcattgatggccttactaagttttttacaccatcacctgatggtcgcagatcacgaggtgaaattatagacttttcaaagcactatcgtccaaggaaaaaggtctctcagaaacagtcatgcacttctcatgtgttggctacaggtaccacacaaaagctaaaacctccaccttcttcacttccacccccaacccccatctccggtcagagccccagttcacaaaagtccagcacggccacttcttctccctctccccagagttcttccagccagtgcagtgtgccctccctgagcagccttaccactaacagccagctgaaggcactctttgatgggctttctcatactataccactcagggacagtctcgcaaaaagggacaccccgagttatgcaccacccaaacgtatgcgtcgtaaaactgaattatcttccacggcaaaatctaaagcccacttctttggcaaaagagatattagaagtcggtttatttctcactcctcctcctctagctgggggatggctagaggaagtatttttaaagcaattgctcacttcaagcgaacaactttccttaaaaagcacaggatgctaggcagattaaaatataaagtgacccctcagatggggaccccctcaccagggaaggggagcttgacagacggaaggattaaacctgatcaggatgatgatactgaaataaaaataaacatcaaacaagaaagtgcagatgtaaatgtgattggaaacaaggatgtcgttactgaagaggatttggatgtttttaagcaggcccaggaactttcttgggagaaaatagagtgtgagagtggggtggaagactgtggccggtacccttctgtgattgaatttggtaaatatgaaatccaaacctggtactcctcgccttacccacaggaatatgcaagattaccaaagctttacctgtgtgaattctgtcttaaatatatgaaaagtaaaaatattttgctaagacactccaagaagtgtggatggtttcatcctccagcaaatgaaatttaccgaaggaaagacctttcagtatttgaggttgatgggaatatgagcaaaatttattgccaaaacctttgcttgttagccaagctcttcctggaccacaaaacgttgtattatgatgtcgagccattccttttttatgtccttacaaaaaatgatgaaaagggctgtcatctggttggatacctctctaaggaaaagctttgccagcagaagtataatgtctcctgcataatgatcatgccccagcaccaaaggcaaggatttggacggtttctcattgatttcagctatttgctttctagaagagaaggccaagcagggtctcctgaaaagcctctctccgatctgggccgtctctcctacctggcatattggaagagcgtcatcttggagtatctctaccaccaccatgagaggcacatcagcatcaaggcaattagcagagcgacgggcatgtgcccacatgacattgccaccactctgcagcacctccacatgatcgacaagagagatggcagatttgtcatcattagacgggaaaagttgatattgagccacatggaaaagctgaaaacctgttccagagccaatgaacttgatccagacagtctgaggtggaccccaattttaatttctaatgctgcagtgtctgaagaagagcgagaagctgagaaagaggctgagcggctaatggaacaagctagctgctgggagaaggaggaacaagaaatcctgtcaactagagctaacagtaggcaatcacctgcaaaagtacaatcgaaaaataaatatttgcattccccggagagccggccagtcacaggggagcgagggcagctgctggagctgtctaaagagagcagtgaagaagaagaggaggaggaggacgaggaggaggaagaagaggaggaagaagaggaagaggatgaagaggaggaagaagaggaagaagaagaagaagaagaagaaaatattcaaagctctcccccaagattgacgaaaccacagtcagttgccataaagagaaagaggccttttgtactaaagaagaaaaggggtcgtaaacgcaggaggatcaacagcagtgtaacaacagagaccatttcagagacgacagaagtactgaatgagccctttgacaactcagatgaagagaggccaatgccacagctggagcctacctgtgagattgaagtggaggaagatggcaggaagccagtcctgagaaaagcattccagcatcagcctgggaagaaaagacaaacagaggaagaggaaggaaaagacaatcattgcttcaagaatgctgacccttgtagaaacaatatgaatgatgattcaagtaacttgaaagaaggcagtaaagacaatcccgaacctctaaagtgcaaacaagtgtggccaaaaggaacaaagcgcggtctatctaagtggaggcaaaacaaagagaggaagaccggatttaaactgaatttgtacaccccgccagaaacacccatggagcctgacgagcaggtaacagtggaagaacagaaggagacttcagaaggaaaaaccagccccagtcccatcaggattgaggaggaggtcaaggaaactggggaagccctgttgcctcaagaggaaaacagaagggaagaaacatgtgcccctgtaagtccaaacacatcaccaggtgaaaaaccagaagatgatctcatcaaacctgaggaagaggaagaggaggaggaggaggaagaggaagaagaggaagaagaggaaggggaagaagaagaaggaggaggaaatgtagaaaaagatccagatggtgctaaaagccaagaaaaagaggaaccagaaatctccacggaaaaagaagactctgcacgtttggatgatcacgaagaggaggaggaagaggatgaagagccatcccacaacgaggaccatgatgccgatgacgaggatgacagccacatggagtctgccgaagtggagaaggaagagctgcccagagaaagcttcaaagaagtactggaaaaccaggagacttttttagaccttaatgtgcagcctggtcactcgaacccagaggtcttaatggactgtggcgtcgacctgacagcttcttgtaacagtgagcccaaggagcttgctggggaccctgaagctgtacccgaatctgacgaggagccacccccaggagaacaggcacagaagcaggaccaaaagaacagcaaggaagtcgatacagagttcaaagagggaaacccagcaaccatggaaatcgactctgagactgtccaggccgttcagtctttgacccaggagagcagcgaacaggacgacacctttcaggattgtgccgagactcaagaggcctgtagaagcctacagaactacacccgtgcagaccaaagtccacagattgccaccacgctcgacgattgccaacagtcggaccacagtagcccagtttcatccgtccactcccatcctggccagtccgtacgttctgtcaacagcccaagtgtccctgctctggaaaacagctacgcccaaatcagcccagatcaaagtgccatctcagtgccatctctgcagaacatggaaaccagtcccatgatggatgtcccatcagtttcagatcattcacagcaagtcgtagacagtggatttagtgacctgggcagtatcgagagcacaactgagaactacgaaaacccaagcagctacgattctactatgggaggcagcatctgtggaaacggctcttcacagaacagctgctcctatagcaacctcacctccagcagtctgacacagagcagctgtgctgtcacccagcagatgtccaacatcagcgggagctgcagcatgctgcagcaaaccagcatcagctcccctccgacctgcagcgtcaagtctcctcaaggctgtgtggtggagaggcctccgagcagcagccagcagctggctcagtgcagcatggctgctaacttcaccccacccatgcagctggctgaaatccccgagacgagcaacgccaacattggcttatacgagcgaatgggtcagagtgattttggggctgggcattacccgcagccgtcagccaccttcagccttgccaaactgcagcagttaactaatacacttattgatcattcattgccttacagccattccgctgctgtgacttcctatgcaaacagtgcctctttgtccacaccattaagtaacacagggcttgttcaactttctcagtctccacactccgtccctgggggaccccaagcacaagctaccatgaccccaccccccaacctgactcctcctccaatgaatctgccgccgcctcttttgcaacggaacatggctgcatcaaatattggcatctctcacagccaaagactgcaaacccagattgccagcaagggccacatctccatgagaaccaagtcagcgtctctgtcaccagccgctgccacccatcagtcacaaatctatgggcgctcccagactgtagccatgcagggtcctgcacggactttaacgatgcaaagaggcatgaacatgagtgtgaacctgatgccagcgccagcctacaatgtcaactctgtgaacatgaacatgaacactctcaacgccatgaatgggtacagcatgtcccagccaatgatgaacagtggctaccacagcaatcatggctatatgaatcaaacgccccaataccctatgcagatgcagatgggcatgatgggcacccagccatatgcccagcagccaatgcagaccccaccccacggtaacatgatgtacacggcccccggacatcacggctacatgaacacaggcatgtccaaacagtctctcaatggctcctacatgagaaggtag

SEQ ID NO: 187 - DNA, 1386 bp, Homo sapiens
gctcctcgccccgcgcctgcccccaggatggtccgcgcgaggcaccagccgggtgggctttgcctcctgctgctgctgctctgccagttcatggaggaccgcagtgcccaggctgggaactgctggctccgtcaagcgaagaacggccgctgccaggtcctgtacaagaccgaactgagcaaggaggagtgctgcagcaccggccggctgagcacctcgtggaccgaggaggacgtgaatgacaacacactcttcaagtggatgattttcaacgggggcgcccccaactgcatcccctgtaaagaaacgtgtgagaacgtggactgtggacctgggaaaaaatgccgaatgaacaagaagaacaaaccccgctgcgtctgcgccccggattgttccaacatcacctggaagggtccagtctgcgggctggatgggaaaacctaccgcaatgaatgtgcactcctaaaggcaagatgtaaagagcagccagaactggaagtccagtaccaaggcagatgtaaaaagacttgtcgggatgttttctgtccaggcagctccacatgtgtggtggaccagaccaataatgcctactgtgtgacctgtaatcggatttgcccagagcctgcttcctctgagcaatatctctgtgggaatgatggagtcacctactccagtgcctgccacctgagaaaggctacctgcctgctgggcagatctattggattagcctatgagggaaagtgtatcaaagcaaagtcctgtgaagatatccagtgcactggtgggaaaaaatgtttatgggatttcaaggttgggagaggccggtgttccctctgtgatgagctgtgccctgacagtaagtcggatgagcctgtctgtgccagtgacaatgccacttatgccagcgagtgtgccatgaaggaagctgcctgctcctcaggtgtgctactggaagtaaagcactccggatcttgcaactgaatctgcccgtaaaacctgagccattgattcttcagaactttctgcagtttttgacttcatagattatgctttaaaaaattttttttaacttattgcataacagcagatgccaaaaacaaaaaaagcatctcactgcaagtcacataaaaatgcaacgctgtaatatggctgtatcagagggctttgaaaacatacactgagctgcttctgcgctgttgttgtccgtatttaaacaacagctcccctgtattcccccatctagccatttcggaagacaccgaggaagaggaggaagatgaagaccaggactacagctttcctatatcttctattctagagtggtaaactctctataagtgttcagtgttcacatagcctttgtgcaaaaaaaaaaaaaaaaaaaaa

SEQ ID NO: 188 - DNA, 1948 bp, Homo sapiens
gagcgccgggctgacgtgcggcggcgatggaagaacttacggcgttcgtctccaagtcttttgaccagaaagtgaaggagaagaaggaggcgatcacgtaccgggaggtgctggagagcgggccgctgcgcggggccaaggagccgaccggctgcaccgaggcgggccgcgacgaccgcagcagcccggcagtccgggcggccggcggaggcggcggcggaggaggcggaggcggcggcggaggaggcggaggaggtgtaggaggaggtggagcaggcggaggagctggaggagggcgctctcccgtccgggagctggacatgggcgccgccgagagaagcagggagcccggcagcccgcggctgacggaggtgtccccggagctgaaagatcgcaaagacgatgcgaaagggatggaggacgaaggccagaccaaaatcaagcagaggcgaagtcggaccaatttcaccctggaacaactcaatgagctggagaggctttttgacgagacccactatcccgacgccttcatgcgagaggaactgagccagcgactgggcctgtcggaggcccgagtgcaggtttggtttcaaaatcgaagagctaaatgtagaaaacaagaaaatcaactccataaaggtgttctcataggggccgccagccagtttgaagcttgtagagtcgcaccttatgtcaacgtaggtgctttaaggatgccatttcagcaggatagtcattgcaacgtgacgcccttgccctttcaggttcaggcgcagctgcagctggacagcgctgtggcgcacgcgcaccaccacctgcatccgcacctggccgcgcacgcgccctacatgatgttcccagcaccgcccttcggactgccgctcgccacgctggccgcggattcggcttccgccgcctcggtagtggcggccgcagcagccgccaagaccaccagcaaggactccagcatcgccgatctcagactgaaagccaaaaagcacgccgcagccctgggtctgtgacgccaacgccagcaccaatgtcgcgcctgtcccgcggcactcagcctgcacgccctccgcgccccgctgcttctccgttacccctttgagacctcgggagccggccctcttcccgcctcactgaccatccctcgtcccctatcgcatcttggactcggaaagccagactccacgcaggaccagggatctcacgaggcacgcaggctccgtggctcctgcccgttttcctactcgagggcctagaattgggttttgtaggagcgggtttgggggagtctggagagagactggacagggtagtgctggaaccgcggagtttggctcaccgcaaagctacaacgatggactcttgcatagaaaaaaaaaatcttgttaacaatgaaaaaatgagcaaacaaaaaaatcgaaagacaaacgggagagaaaaagaggaaggcaacttatttcttaactgctatttggcagaagctgaaattggagaaccaaggagcaaaaacaaattttaaaattaaagtattttatacatttaaaaatatggaaaaacaacccagacgattctcgagagactggggggagttaccaacttaaatgtgtgttttaaaaaatgcgctaagaaggcaaagcagaaagaagaggtatacttatttaaaaaactaagatgaaaaaagtgcgcaggtgggaagttcacaggttttgaaactgacctttttctgcgaagttcacgttaatacgagaaatttgatgagagaggcgggcctccttttacgttgaatcagatgctttgagtttaaacccaccatgtatggaagagcaagaaaagagaaaatattaaaacgaggagagagaaaaataatggcaaaactgtctggactgctgacagtaaattccggtttgcatggaaaaaaaaaaaaaaaaaaaaaaaaaaa

SEQ ID NO: 189 - DNA, 6202 bp, Homo sapiens
agggagagagggcggggttattggaagaagaaaaagaaaaaaagaactagataaaggagggcacatccctctcactcccgcctttccccttacctttctgtctctcgggacccttatttcttcgtcacggtgtccaggaccattttgaccctgtcggccccggcacccccccgccgcaccccagccccgagcatggggacggcgctgctccagcgcgggggctgttttcttctgtgcctctcgctgctgctcctgggctgctgggcggagctgggcagcgggctggagtttccgggcgccgagggccaatggacgcgcttccccaagtggaacgcctgctgcgagagcgagatgagcttccagctcaagactcgcagcgcccgcggcctcgtgctctacttcgacgacgagggcttctgcgacttcctggagctgattctgacgcgcggcggccgcctgcagctcagcttctccatcttctgcgctgagcctgcgacgctcctggccgacacgccggttaacgacggcgcctggcacagcgtgcgcatccgccgccagttccgcaacaccacgctcttcatcgaccaggtggaggccaagtgggtggaggtcaagtccaagcgcagggacatgacggtgttcagcggccttttcgtcggggggctgcccccggaactgcgcgccgcggcgctcaagctcaccctggcctcggtgagggagcgggagcccttcaaggggtggattcgtgacgtgagggtcaactcctcgcaggtcctgcccgtggacagcggcgaggtgaagctggacgatgagccgcccaacagcggcgggggaagcccgtgcgaggcgggcgaggagggcgagggcggggtgtgcctcaacggaggtgtgtgctccgtggtggacgaccaggccgtgtgcgactgctcgcgaaccggcttccgcggcaaggactgcagccaagaagacaacaatgtggaaggtctggcgcacctgatgatgggcgaccaaggtaaaagtaaaggaaaagaagaatatattgccacgttcaaaggatctgaatacttctgctacgacttgtctcaaaaccccattcaaagcagcagtgatgaaataactctgtcatttaaaacccttcagaggaatggactgatgcttcacactgggaaatcggctgattatgtcaatcttgccctgaaaaatggagctgtctctctggtcattaatttgggatcaggggcctttgaagcactagtggagcctgtgaatggaaagtttaatgataatgcctggcatgatgtgaaagtcaccaggaatctgcgtcagcactcaggcattggacacgctatggtgacaatatcagtggatgggattcttaccacaacgggctacacgcaagaagattataccatgctggggtctgatgactttttctatgttggaggcagtcccagcacagccgaccttccagggtcaccagtcagtaacaactttatgggctgtctcaaagaggttgtatataaaaataatgatgtgaggctggaattatctcgacttgccaagcaaggagatcctaagatgaagatccatggagtggtggcatttaaatgtgagaatgttgcaactttagacccaatcacctttgaaaccccagagtctttcatctctttgcctaaatggaatgcaaagaaaactggctccatatcatttgatttccgtacaacagagccaaatggcctcatcttatttagccatggcaagccaagacatcagaaagatgccaagcacccacagatgataaaggtggacttctttgctattgagatgctagatggccacctctacctcctcctggacatggggtcaggtactataaaaataaaagccctgttgaagaaagtgaatgatggagaatggtatcatgtggacttccagagagacggacggtcaggtaccatttctgtcaacacgttgcgtactccctacactgctcctggtgagagtgagattctggacctggatgatgagttgtacctgggggggctgccagaaaataaagctggccttgtcttccccaccgaggtgtggactgctctgctcaactatggctacgtgggctgcatcagggatttgttcatcgatggccaaagcaaagatatccggcaaatggctgaagttcaaagtactgctggagtgaagccttcctgctcaaaggaaacagcaaaaccgtgccttagcaacccttgcaaaaacaatggcatgtgcagggatgggtggaacagatatgtctgtgattgttccggaacaggctatcttggcaggtcctgtgagagagaggcaacggttttgagctatgatgggagcatgtttatgaaaattcagctccccgtagtcatgcatacggaggctgaggatgtttccttacggttccgatcccagcgtgcatatggcattctgatggcaaccacttctagagactctgctgacaccctccgcctggagctagacgcaggacgtgtgaaactgacggtcaatctagattgtatcaggattaactgtaattccagcaaaggtcccgagactctttttgctggctataacctcaatgataacgagtggcacacagtgcgtgtagttcggcgtggaaaaagtttaaagttaacagtggatgaccaacaggccatgacaggtcaaatggcaggtgatcatactaggctggagttccataacatagagactggcatcatcacagaacgacggtatctttcttctgtcccctccaacttcattggacacctgcagagcttgacatttaatggaatggcatacattgacctgtgtaaaaatggcgacatagattactgtgagcttaatgccagatttggcttcaggaacatcatagcagatcctgtcaccttcaagaccaaatcgagctatgttgccttagctaccttgcaagcctacacttctatgcatctttttttccagttcaagacaacatccctagatggattaattctatataacagtggggatggaaatgactttattgtggttgaattagttaaagggtacttacattacgtgtttgatttgggaaatggtgctaacctcatcaaaggaagctcaaataaacctctcaatgacaatcagtggcacaacgtgatgatatcaagggacaccagcaacctccacactgtaaagattgacacaaaaatcacaacgcaaatcaccgccggagccaggaacttagacctcaagagtgacttatatataggaggagtagctaaagaaacatacaaatccttaccaaaacttgtacatgccaaagaaggctttcaaggctgcctggcatcagttgatttaaatggacggcttccggacctcatctccgatgctcttttctgcaacggacagatcgagagaggatgtgaagggcccagcacaacctgccaagaggactcatgttccaatcaaggtgtgtgcttgcaacaatgggatggcttcagctgtgactgtagtatgacttccttcagtggaccactctgcaatgaccctgggacgacatatatctttagcaaaggtggtggacaaatcacgtataagtggcctcctaatgaccgacccagtacgcgagcagacagactggccataggttttagcactgttcagaaagaagctgtattggtgcgagtggacagttcttcaggcttgggtgactacctagaactgcatatacaccagggaaaaattggagttaagtttaatgttgggacagatgacatcgccattgaagaatccaatgcaatcattaatgatgggaaataccatgtagttcgtttcacgaggagtggtggcaatgccacgttgcaggtggacagctggccagtgatcgagcgctaccctgcagggcgtcagctcacaatcttcaatagccaagcaaccataataattggcgggaaagagcagggccagcccttccagggccagctctctgggctgtactacaatggcttgaaagttctgaatatggcagccgaaaacgatgccaacatcgccatagtgggaaatgtgagactggttggtgaagtgccttcctctatgacaactgagtcaacagccactgccatgcaatcagagatgtccacatcaattatggagactaccacgaccctggctactagcacagccagaagaggaaagcccccgacaaaagaacccattagccagaccacagatgacatccttgtggcctcagcagagtgtcccagcgatgatgaggacattgacccctgtgagccgagctcaggtgggttagccaacccaacccgagcaggcggcagagagccgtatccaggctcagcagaagtgatccgggagtccagcagcaccacgggtatggtcgttgggatagtagccgctgccgccctgtgcatccttatcctcctctatgccatgtacaagtacagaaaccgggatgaaggctcataccatgtggacgagagtcgaaactacatcagtaactcagcacagtccaatggggctgttgtaaaggagaaacaacccagcagtgcgaaaagctccaacaaaaataagaaaaacaaggataaagagtattatgtctgatcccaagatcttaaatggacacttgtatagaaatagtcttcattttatctgagacataatataaacttatttactttcctttttatgaagcacatacaaaagaagacagagaatgcaatcaggaaggaaagactttttaaaaaataaaaacaagtatctcatgctcttgtttctcaaaaaagaaaaacaaaaaacaaaaaacaggggccaataaattccctaacatccacagtgttttcatttactctgcttgtctttatgttgctggaacatttctaaaagacagtgatgaccgcacgcattcataaagcaaaggagtactacagcatcaaggcacaacacaaaaaccaacacaaaacataacacaaaaaagaagctacctatgatcctggatttagccaaagtgctagcgctttcctgagaagtcagtccaattgccagagaagactgtccttttgagtgactcaacctgcaaacctttaagagtttgccgcctggtgcaactggagcagtggttggaacttgcatttgaaacaaagtgctggcttttttgaagacttgtgtaggaacacattcaaaaagcccctttctggttgtgagagaggaaaaaaaagtatggaggccttattttcaaaaatgtgaaatataaggcacgttttcacacaaaatttcaaaacaaaaacaagagggcatagatgcaatcattgggaaattttcatgcacgcttattatgttattacatatgtttatataaaatccatctctgtgtgctttctggactgtgataagtgacgttttatagcctgttgtatagaaaatgcaaaatatatctctgctcttcagccatttttggtaaattcaatgttataagtgttgctaagtatagggagttttatgacatcagagcaacaattatttcagttgggtttttctttttttttgccaccattataaattgccacaattacttttattttttaaagaaattacagtgtagtgtttattctaaggaagatatgtatgaatgtatatacaaagactcagctacttcttttcttatatgtacagccttcattctgttgcaattaagttttagtacttgtatgaaaggtgtgaattagaaagtcacatatatacatatgtatcttataatcttttctccctgaaatactcacattcccacatacattcactattttcacacacacacacacacacacacacacacgaatccacagcaatccatcagatatgctggaagatccaaacgtgcatacagtagcaaatatttattgacaaattgaaaagcaggaaggaagagggttgtgccaaggtattgatgacaaatggggtgatttgcttcattgagatcttgctcccaggtaaccttaagaagattttagtccctaaagaaatgaacctttccttatcaaatagaatatcactgatatactgctgcatgaataagaaccattatgtgggcaggttatggaagcaaaattggttaatctacaccttaactctggctgctgcaattgaaaactttctttctaataaaataatatatatatctctg

SEQ ID NO: 190 - DNA, 1989 bp, Homo sapiens
gcggccgccgggactcttcctggagacaccgccatggccgggctatcccgcgggtccgcgcgcgcactgctcgccgccctgctggcgtcgacgctgttggcgctgctcgtgtcgcccgcgcggggtcgcggcggccgggaccacggggactgggacgaggcctcccggctgccgccgctaccaccccgcgaggacgcggcgcgcgtggcccgcttcgtgacgcacgtctccgactggggcgctctggccaccatctccacgctggaggcggtgcgcggccggcccttcgccgacgtcctctcgctcagcgacgggcccccgggcgcgggcagcggcgtgccctatttctacctgagcccgctgcagctctccgtgagcaacctgcaggagaatccatatgctacactgaccatgactttggcacagaccaacttctgcaagaaacatggatttgatccacaaagtcccctttgtgttcacataatgctgtcaggaactgtgaccaaggtgaatgaaacagaaatggatattgcaaagcattcgttattcattcgacaccctgagatgaaaacctggccttccagccataattggttctttgctaagttgaatataaccaatatctgggtcctggactactttggtggaccaaaaatcgtgacaccagaagaatattataatgtcacagttcagtgaagcagactgtggtgaatttagcaacacttatgaagtttcttaaagtggctcatacacacttaaaaggcttaatgtttctctggaaagcgtcccagaatattagccagttttctgtcacatgctggtttgtttgcttgcttgtttacttgcttgtttaccaatagagttgacctgttattggatttcctggaagatgtggtagctacttttttcctattttgaagccattttcgtagagaaatatccttcactataatcaaataagttttgtcccatcaattccaaagatgtttccagtggtgctcttgaagaggaatgagtaccagttttaaattgcccattggcatttgaaggtagttgagtatgtgttctttattcctagaagccactgtgcttggtagagtgcatcactcaccacagctgcctcctgagctgcctgagcctggtgcaaaaggattggcccccattatggtgcttctgaataaatcttgccaagatagacaaacaatgatgaaactcagatggagcttcctactcatgttgatttatgtctcacaatcctgggtattgttaattcaacatagggtgaaactatttctgataaagaacttttgaaaaactttttatactctaaagtgatactcagaacaaaagaaagtcataaaactcctgaatttaatttccccacctaagtcgagacagtattatcaaaacacatgtgcacacagattattttttggctccaaaactggattgcaaaagaaagaggagaagaatattttgtgtgttcctggtattcttttataagtaaagtttacccaggcatggaccagcttcagccagggacaaaatcccctcccaaaccactctccacagctttttaaaaatacttctactcttaacaattacctaaggcttcctcaactgccccaaatctcttaatagcttctagtgctgctacaatctaagtcaggtcaccagagggaagagaacatggcattaaaagaatcacatcttcagaagagaagacactaatattattacccatatacatgatttcagaagatgacataagattcctcttaaagaggaaatgtcaggaatcaagccactgaatccttaaagagaaaagttgaatatgagtcattgtgtctgaaaactgcaaagtgaacttaactgagatccagcaaacaggttctgtttaagaaaaataatttatactaaatttagtaaaatggacttcttattcaaagcatcaataattaaaagaattattttaaaaaaaaaaaaaaa

SEQ ID NO: 191 - DNA, 2164 bp, Homo sapiens
ggcacgagggcttgctgtggccctgtcaggaagagtagagctctggtccagctccgcgcagggagggaggctgtcaccatgccggcctgctgcagctgcagtgatgttttccagtatgagacgaacaaagtcactcggatccagagcatgaattatggcaccattaagtggttcttccacgtgatcatcttttcctacgtttgctttgctctggtgagtgacaagctgtaccagcggaaagagcctgtcatcagttctgtgcacaccaaggtgaaggggatagcagaggtgaaagaggagatcgtggagaatggagtgaagaagttggtgcacagtgtctttgacaccgcagactacaccttccctttgcaggggaactctttcttcgtgatgacaaactttctcaaaacagaaggccaagagcagcggttgtgtcccgagtatcccacccgcaggacgctctgttcctctgaccgaggttgtaaaaagggatggatggacccgcagagcaaaggaattcagaccggaaggtgtgtagtgcatgaagggaaccagaagacctgtgaagtctctgcctggtgccccatcgaggcagtggaagaggccccccggcctgctctcttgaacagtgccgaaaacttcactgtgctcatcaagaacaatatcgacttccccggccacaactacaccacgagaaacatcctgccaggtttaaacatcacttgtaccttccacaagactcagaatccacagtgtcccattttccgactaggagacatcttccgagaaacaggcgataatttttcagatgtggcaattcagggcggaataatgggcattgagatctactgggactgcaacctagaccgttggttccatcactgccatcccaaatacagtttccgtcgccttgacgacaagaccaccaacgtgtccttgtaccctggctacaacttcagatacgccaagtactacaaggaaaacaatgttgagaaacggactctgataaaagtcttcgggatccgttttgacatcctggtttttggcaccggaggaaaatttgacattatccagctggttgtgtacatcggctcaaccctctcctacttcggtctggccgctgtgttcatcgacttcctcatcgacacttactccagtaactgctgtcgctcccatatttatccctggtgcaagtgctgtcagccctgtgtggtcaacgaatactactacaggaagaagtgcgagtccattgtggagccaaagccgacattaaagtatgtgtcctttgtggatgaatcccacattaggatggtgaaccagcagctactagggagaagtctgcaagatgtcaagggccaagaagtcccaagacctgcgatggacttcacagatttgtccaggctgcccctggccctccatgacacacccccgattcctggacaaccagaggagatacagctgcttagaaaggaggcgactcctagatccagggatagccccgtctggtgccagtgtggaagctgcctcccatctcaactccctgagagccacaggtgcctggaggagctgtgctgccggaaaaagccgggggcctgcatcaccacctcagagctgttcaggaagctggtcctgtccagacacgtcctgcagttcctcctgctctaccaggagcccttgctggcgctggatgtggattccaccaacagccggctgcggcactgtgcctacaggtgctacgccacctggcgcttcggctcccaggacatggctgactttgccatcctgcccagctgctgccgctggaggatccggaaagagtttccgaagagtgaagggcagtacagtggcttcaagagtccttactgaagccaggcaccgtggctcacgtctgtaatcccagcgctttgggaggccgaggcaggcagatcacctgaggtcgggagttggagacccgcctggctaacaaggcgaaatcctgtctgtactaaaaatacaaaaatcagccagacatggtggcatgcacctgcaatcccagctactcgggaggctgaggcacaagaatcacttgaacccgggaggcagaggttgtagtgagcccagattgtgccactgctctccagcctgggaggcacagcaaactgtcccaaaaaaaaaaaaaaaaaaa

SEQ ID NO: 192 - DNA, 7718 bp, Homo sapiens
cgggagcggcgggagcggtggcggcggcagaggcggcggctccagcttcggctccggctcgggctcgggctccggctccggctccggctccggctccagctcgggtggcggtggcgggagcgggaccaggtggaggcggcggcggcagaggagtgggagcagcggccctagcggcttgcggggggacatgcggaccgacggcccctggataggcggaaggagtggaggccctggtgcccggcccttggtgctgagtatccagcaagagtgaccggggtgaagaagcaaagactcggttgattgtcctgggctgtggctggctgtggagctagagccctggatggcccctgagccagccccagggaggacgatggtgccccttgtgcctgcactggtgatgcttggtttggtggcaggcgcccatggtgacagcaaacctgtcttcattaaagtccctgaggaccagactgggctgtcaggaggggtagcctccttcgtgtgccaagctacaggagaacccaagccgcgcatcacatggatgaagaaggggaagaaagtcagctcccagcgcttcgaggtcattgagtttgatgatggggcagggtcagtgcttcggatccagccattgcgggtgcagcgagatgaagccatctatgagtgtacagctactaacagcctgggtgagatcaacactagtgccaagctctcagtgctcgaagaggaacagctgccccctgggttcccttccatcgacatggggcctcagctgaaggtggtggagaaggcacgcacagccaccatgctatgtgccgcaggcggaaatccagaccctgagatttcttggttcaaggacttccttcctgtagaccctgccacgagcaacggccgcatcaagcagctgcgttcaggtgccttgcagatagagagcagtgaggaatccgaccaaggcaagtacgagtgtgtggcgaccaactcggcaggcacacgttactcagcccctgcgaacctgtatgtgcgagtgcgccgcgtggctcctcgtttctccatccctcccagcagccaggaggtgatgccaggcggcagcgtgaacctgacatgcgtggcagtgggtgcacccatgccctacgtgaagtggatgatgggggccgaggagctcaccaaggaggatgagatgccagttggccgcaacgtcctggagctcagcaatgtcgtacgctctgccaactacacctgtgtggccatctcctcgctgggcatgatcgaggccacagcccaggtcacagtgaaagctcttccaaagcctccgattgatcttgtggtgacagagacaactgccaccagtgtcaccctcacctgggactctgggaactcggagcctgtaacctactatggcatccagtaccgcgcagcgggcacggagggcccctttcaggaggtggatggtgtggccaccacccgctacagcattggcggcctcagccctttctcggaatatgccttccgcgtgctggcggtgaacagcatcgggcgagggccgcccagcgaggcagtgcgggcacgcacgggagaacaggcgccctccagcccaccgcgccgcgtgcaggcacgcatgctgagcgccagcaccatgctggtgcagtgggagcctcccgaggagcccaacggcctggtgcggggataccgcgtctactatactccggactcccgccgccccccgaacgcctggcacaagcacaacaccgacgcggggctcctcacgaccgtgggcagcctgctgcctggcatcacctacagcctgcgcgtgcttgccttcaccgccgtgggcgatggccctcccagccccaccatccaggtcaagacgcagcagggagtgcctgcccagcccgcggacttccaggccgaggtggagtcggacaccaggatccagctctcgtggctgctgccccctcaggagcggatcatcatgtatgaactggtgtactgggcggcagaggacgaagaccaacagcacaaggtcaccttcgacccaacctcctcctacacactagaggacctgaagcctgacacactctaccgcttccagctggctgcacgctcggatatgggggtgggcgtcttcacccccaccattgaggcccgcacagcccagtccaccccctccgcccctccccagaaggtgatgtgtgtgagcatgggctccaccacggtccgggtaagttgggtcccgccgcctgccgacagccgcaacggcgttatcacccagtactccgtggcccacgaggcggtggacggcgaggaccgcgggcggcatgtggtggatggcatcagccgtgagcactccagctgggacctggtgggcctggagaagtggacggagtaccgggtgtgggtgcgggcacacacagacgtgggccccggccccgagagcagcccggtgctggtgcgcaccgatgaggacgtgcccagcgggcctccgcggaaggtggaggtggagccactgaactccactgctgtgcatgtctactggaagctgcctgtccccagcaagcagcatggccagatccgcggctaccaggtcacctacgtgcggctggagaatggcgagccccgtggactccccatcatccaagacgtcatgctagccgaggcccagtggcggccagaggagtccgaggactatgaaaccactatcagcggcctgaccccggagaccacctactccgttactgttgctgcctataccaccaagggggatggtgcccgcagcaagcccaaaattgtcactacaacaggtgcagtcccaggccggcccaccatgatgatcagcaccacggccatgaacactgcgctgctccagtggcacccacccaaggaactgcctggcgagctgctgggctaccggctgcagtactgccgggccgacgaggcgcggcccaacaccatagatttcggcaaggatgaccagcacttcacagtcaccggcctgcacaaggggaccacctacatcttccggcttgctgccaagaaccgggctggcttgggtgaggagttcgagaaggagatcaggacccccgaggacctgcccagcggcttcccccaaaacctgcatgtgacaggactgaccacgtctaccacagaactggcctgggacccgccagtgctggcggagaggaacgggcgcatcatcagctacaccgtggtgttccgagacatcaacagccaacaggagctgcagaacatcacgacagacacccgctttacccttactggcctcaagccagacaccacttacgacatcaaggtccgcgcatggaccagcaaaggctctggcccactcagccccagcatccagtcccggaccatgccggtggagcaagtgtttgccaagaacttccgggtggcggctgcaatgaagacgtctgtgctgctcagctgggaggttcccgactcctataagtcagctgtgccctttaagattctgtacaatgggcagagtgtggaggtggacgggcactcgatgcggaagctgatcgcagacctgcagcccaacacagagtactcgtttgtgctgatgaaccgtggcagcagcgcagggggcctgcagcacctggtgtccatccgcacagcccccgacctcctgcctcacaagccgctgcctgcctctgcctacatagaggacggccgcttcgatctctccatgccccatgtgcaagacccctcgcttgtcaggtggttctacattgttgtggtacccattgaccgtgtgggcgggagcatgctgacgccaaggtggagcacacccgaggaactggagctggacgagcttctagaagccatcgagcaaggcggagaggagcagcggcggcggcggcggcaggcagaacgtctgaagccatatgtggctgctcaactggatgtgctcccggagacctttaccttgggggacaagaagaactaccggggcttctacaaccggcccctgtctccggacttgagctaccagtgctttgtgcttgcctccttgaaggaacccatggaccagaagcgctatgcctccagcccctactcggatgagatcgtggtccaggtgacaccagcccagcagcaggaggagccggagatgctgtgggtgacgggtcccgtgctggcagtcatcctcatcatcctcattgtcatcgccatcctcttgttcaaaaggaaaaggacccactctccgtcctctaaggatgagcagtcgatcggactgaaggactccttgctggcccactcctctgaccctgtggagatgcggaggctcaactaccagaccccaggtatgcgagaccacccacccatccccatcaccgacctggcggacaacatcgagcgcctcaaagccaacgatggcctcaagttctcccaggagtatgagtccatcgaccctggacagcagttcacgtgggagaattcaaacctggaggtgaacaagcccaagaaccgctatgcgaatgtcatcgcctacgaccactctcgagtcatccttacctctatcgatggcgtccccgggagtgactacatcaatgccaactacatcgatggctaccgcaagcagaatgcctacatcgccacgcagggccccctgcccgagaccatgggcgatttctggagaatggtgtgggaacagcgcacggccactgtggtcatgatgacacggctggaggagaagtcccgggtaaaatgtgatcagtactggccagcccgtggcaccgagacctgtggccttattcaggtgaccctgttggacacagtggagctggccacatacactgtgcgcaccttcgcactccacaagagtggctccagtgagaagcgtgagctgcgtcagtttcagttcatggcctggccagaccatggagttcctgagtacccaactcccatcctggccttcctacgacgggtcaaggcctgcaaccccctagacgcagggcccatggtggtgcactgcagcgcgggcgtgggccgcaccggctgcttcatcgtgattgatgccatgttggagcggatgaagcacgagaagacggtggacatctatggccacgtgacctgcatgcgatcacagaggaactacatggtgcagacggaggaccagtacgtgttcatccatgaggcgctgctggaggctgccacgtgcggccacacagaggtgcctgcccgcaacctgtatgcccacatccagaagctgggccaagtgcctccaggggagagtgtgaccgccatggagctcgagttcaagttgctggccagctccaaggcccacacgtcccgcttcatcagcgccaacctgccctgcaacaagttcaagaaccggctggtgaacatcatgccctacgaattgacccgtgtgtgtctgcagcccatccgtggtgtggagggctctgactacatcaatgccagcttcctggatggttatagacagcagaaggcctacatagctacacaggggcctctggcagagagcaccgaggacttctggcgcatgctatgggagcacaattccaccatcatcgtcatgctgaccaagcttcgggagatgggcagggagaaatgccaccagtactggccagcagagcgctctgctcgctaccagtactttgttgttgacccgatggctgagtacaacatgccccagtatatcctgcgtgagttcaaggtcacggatgcccgggatgggcagtcaaggacaatccggcagttccagttcacagactggccagagcagggcgtgcccaagacaggcgagggattcattgacttcatcgggcaggtgcataagaccaaggagcagtttggacaggatgggcctatcacggtgcactgcagtgctggcgtgggccgcaccggggtgttcatcactctgagcatcgtcctggagcgcatgcgctatgagggcgtggtcgacatgtttcagaccgtgaagaccctgcgtacacagcgtcctgccatggtgcagacagaggaccagtatcagctgtgctaccgtgcggccctggagtacctcggcagctttgaccactatgcaacgtaactaccgctcccctctcctccgccacccccgccgtggggctccggaggggacccagctcctctgagccataccgaccatcgtccagccctcctacgcagatgctgtcactggcagagcacagcccacggggatcacagcgtttcaggaacgttgccacaccaatcagagagcctagaacatccctgggcaagtggatggcccagcaggcaggcactgtggcccttctgtccaccagacccacctggagcccgcttcaagctctctgttgcgctcccgcatttctcatgcttcttctcatggggtggggttggggcaaagcctcctttttaatacattaagtggggtagactgagggattttagcctcttccctctgatttttcctttcgcgaatccgtatctgcagaatgggccactgtaggggttggggtttattttgttttgttttttttttttttttgtatgacttctgctgaaggacagaacattgccttcctcgtgcagagctggggctgccagcctgagcggaggctcggccgtgggccgggaggcagtgctgatccggctgctcctccagcccttcagacgagatcctgtttcagctaaatgcagggaaactcaatgtttttttaagttttgttttccctttaaagcctttttttaggccacattgacagtggtgggcggggagaagatagggaacactcatccctggtcgtctatcccagtgtgtgtttaacattcacagcccagaaccacagatgtgtctgggagagcctggcaaggcattcctcatcaccatcgtgtttgcaaaggttaaaacaaaaacaaaaaaccacaaaaataaaaaacaaaaaaaacaaaaaacccaaaaaaaaaaaaaaaaagagtcagcccttggcttctgcttcaaaccctcaagaggggaagcaactccgtgtgcctggggttcccgagggagctgctggctgacctgggcccacagagcctggctttggtccccagcattgcagtatggtgtggtgtttgtaggctgtggggtctggctgtgtggccaaggtgaatagcacaggttagggtgtgtgccacaccccatgcacctcagggccaagcgggggcgtggctggcctttcaggtccaggccagtgggcctggtagcacatgtctgtcctcagagcaggggccagatgattttcctccctggtttgcagctgttttcaaagcccccgataatcgctcttttccactccaagatgccctcataaaccaatgtggcaagactactggacttctatcaatggtactctaatcagtccttattatcccagcttgctgaggggcagggagagcgcctcttcctctgggcagcgctatctagataggtaagtgggggcggggaagggtgcatagctgttttagctgagggacgtggtgccgacgtccccaaacctagctaggctaagtcaagatcaacattccagggttggtaatgttggatgatgaaacattcatttttaccttgtggatgctagtgctgtagagttcactgttgtacacagtctgttttctatttgttaagaaaaactacagcatcattgcataattcttgatggtaataaatttgaataatcagatttcttacaaaaaaaaaaaaa

SEQ ID NO: 193 - DNA, 2732 bp, Homo sapiens
ggagccgcgccgcatctcaggcgcagtctctaggggctgtgcgcatcctagggggggacatgtgcatctcaggggggctgctcgcatctggggggtgctgtgtgcatctcgggggggctgttgcatctacgcggggtggctgtgtccgcatctggagggggctgtgcgcaacccggggggggtgttgcgcgcatctagcaggggcggctgtgcgcatttcgggggggggctgtgcatatctggggggacacgtgcttatctctgggggcggctgtgcgcatcttgaggggtgtgtacatctcggggggcctgtgcatcttggggggctgtgtgcatccgcgggggctgtgcgcatctcggggtgctgtgcgctgctcctctgagctctgctctttcttgcagcgtttgcctcagccatggagggcggggccgcggcagccacccccacagcactgccttactacgtggccttctcccagctgctgggcctgaccttggtggccatgaccggcgcgtggctcgggctgtaccgaggcggcattgcctgggagagcgacctgcagttcaacgcgcaccccctctgcatggtcataggcctgatcttcctgcagggaaatgccctgctggtttaccgtgtcttcaggaacgaagctaaacgcaccaccaaggtcctgcacgggctgctgcacatctttgcgctcgtcatcgccctggttggcttggtggcggtgttcgactaccacaggaagaagggctacgctgacctgtacagcctacacagctggtgcgggatccttgtctttgtcctgtactttgtgcagtggctggtgggcttcagcttcttcctgttccccggagcttcattctccctgcggagccgctaccgcccacagcacatcttctttggtgctaccatcttcctccttcccgtgggcaccgccctgctgggcctgaaggaggcactgctgttcaacctcgggggcaagtatagcgcatttgagcccgagggtgtcctggccaacgtgctgggcctgctgctggcctgcttcggtggggcggtgctctacatcttgacccgggccgactggaagcggccttcccaggcggaagagcaggccctctccatggacttcaagacgctgaggcagggagatagccccggctcccagtgatgcgcccggccggccctgggggttcgcggggtgtcttcttgcctgcccctgctgaggcgtcttcaggactgcaggctccggagagtggctctggcagcaggcgggcgcgtgggtgcagggggatccgtttgatgcgtcgtttctggggcaggtctccgcctcctctgcttctcgtttctccgctgctatagaccagttcattgtgtgtggctcccgtgtctctgttgcccccttcagtgcagaaggctttgggtagacttcgggtgttcggtcctggtcgcagagcacagatctttaaagaagcgttagagaggtaggttctaccctcttggtagtagatgcctggggcaaggcccaggggaaactgggggggcctcagggacaggcctggaaaggccacgatggcctgctgaattcaaacaaggagtccctccagcctgaataacacgtggcacaaatgggcccggcctttggcagaggagcaagtgatatgatgtgtaaagtatgttggtggtgaaagcaaggttccccaggagaggggagggactggcccctgggaagctgtgagatgaggctgtggcccagctgtagtcctgaccttactcttctttaaaaccctttagccctaggatggctttggtgggagaggggatagaagcccatgacttcagacagactttctcttggcagatgcaggcaggcctcctcccaggctgctccagacatgggggttggggatggggggtaccttgcagccccttcctgctggggctccctccttgtagcacccccttgcggctcagctctggtttcctctcccaggctcacccaggctctgctcaggctgggaggcagagggcacaaaccttataattttttaaatgaaaaaccgctgctgctggctgtggctagagccccctggggctgctggagctgctgcctctgttctggaggacgagccttctccttatctgctgcccatctttccaggaagtcaggatggagtcagacaactaacgatcatcccccgtgggtgtctgcacatcactccagccccataaagagtgtcatgttagctgagtcaccatttggcttcggcctggaaatagtgtgttagaacactgatcgtgtgcgaggccaggagatcaagaccatcctgactaacaaacacagtgaaaccccgtctctactaaaaatacaaaaaaattagccaggcgtggtggtgggcgcctgtagtcccagctacttgggagacaggtctctacggaattccctgtattagtctatatggttctccaagaaactgaatgaatccattggagaagcggtggataactagccacgacaaaatttgagaatacataaacaacgcattccgcaggaaacatacagaggatgccttttctgtgattgggtgggattttttccctttttatgtggatatagtagttacttgtgacaagaataattttggaataatttctattaatatcaactctgaagctaattgtacataatctcgagattgtgtttgttcataataaaagtgaagtgaatgtg

SEQ ID NO: 194 - DNA, 3773 bp, Homo sapiens
ccgtcccggggcggacgggcgcgggcgggaggatggagctgaactccctgctgatcctgctggaggcggccgagtacctggagcgcagggatcgagaggccgagcacggctacgcctcggtgctgcccttcgacggcgacttcgccagggagaaaacaaaggcggccggcctggtgcgcaaggccccgaacaacaggtcttcacacaacgagctagaaaagcacagacgagccaaactcaggctgtaccttgagcagctcaagcaactggtgcccctgggccccgacagcacccgccacaccacgctgagcctcctgaagcgggccaaggtgcacatcaagaaactggaggagcaggaccgccgggcactgagcatcaaggagcagctgcagcaggagcatcgtttcctgaagcggcgcctggagcagctgtcggtgcagagcgtggagcgcgtgcgcacagatagcacgggctctgctgtctccacggacgactcagagcaagaagtggacatagagggcatggagtttggccctggtgagctggacagtgttggcagcagcagtgacgcggacgaccactacagcctgcagagtggcaccggcggcgacagtggcttcgggccccactgccggcggctgggccgccccgccctctcgtaggcccgtgccctctgctccttggcctgcctgcccgccagccacgcgtgtcagccctccagttctccttcagttgacgccagcctctccacaggcccactgctgtgccattctggaagctccagctgctgctgggctgcctggcactgcccgcttgccggtcagggcctgccgagctgcctgccccttccagctgggcagagtcccctgcaaggaggcagggcccagcttccacatccggagccctggtcagcatagccgcccacggtctgttctcagattcctaatcattccagaagtattaaacgtcattgctgcaaacctcggcaggtgccgtgtgaggggcttaatgaccaccacagggagctcagaccccaaccctggatcccaggagaaaggagtggaccgaggaaggaaggaaggcaaggctgtctgtccatccgtccgtctgtccacctacctgtcagtccacataggctcctggcgtggacaaggggtctgtgaagggcgggaactgggtgagcacctggggcaggtgggtggttaaggtccttcccacttcgcaggtgtcagaacctagggctgggctctcggggccaggcaggccagcccagcccacgccgagctgggcagcgtctgctctggtaggactgtcagacgcacacgcgcacgcacctagacacacccactcatgtacatgctcacacatgcagacacacctgggcgtcccgaggtcacatgttctggggatgatggccttcaggggtcatctggcaaacagcccctgggctgtgcctggatccccctctagctcctgctcacccacgcccacccagtagtcctgcctgtctgcacaggagaggggcttctcttcctggctggggctggggtgaactggaggctggttaagttgcagccgctgggtcctcgggggcttactcatctcccttttttaaacaaaaagcaaaaaagtaaaatgctgcactgcccagcagcccggttagggctcctggagccaccttaggaaagggcttctcatgagctctgctgcggcagcttcagctggcagagaggctttcccagaaaaaaaaaaaaaaccatttttaaaaagaagaaagcctaaagactctcggcctagggacgtccgtgtgtgccgcctctgtttcctgtaccagatttttgtattctattttcctagctgttgttgcgtccttgtttgctgaggggtgggagccacccagcgtctcagggacctgtccctccgtcacgtcgtcaaagtgtgccttgtgtcttgtgtcaggccttgcccttcccaccagcatgtccctcgtggctcagggtgccccaggcctgcccagctagtgctgtcctcccatctcctgtgggcagcccctcccggcagccagggcttcctggaggcgatgcagccaggcccctgtgggtggcacggaggggctgtgacctggtccccagtgttgccctccccagtggctggcaggggcctgcttgctcactagagagatggattctcacctgtcacctgactcgagccccctgcttcctggcctaggcgagggttccaggtttcagacactggcagccaatgaagactgtgctcgctgggtggtgcaggcctggcaccaggaggcttgcacccgcctttccttcctgacgtcctctgtccttggggctggcccatagcagtgcctgccgtgcctctggtacatctgtagccaattcccatatcatggggaaaattcgtgtctattttcagtcgtacgcatagacgccccaggatggggggcccactgtggcggaagggggtccctggaaacaactctggcacagaacctgccctgcaggctgtagggggcatggtgcctggagctgaggggcatccgaacgcgttgcgggtggttgtgaggaggcctgtctgcatctccttccggccccactggggtccaggggtgcccagaaaggagcttcccctgcctgcctgagtctgtccccccaggcttcatttcaaacaccgtggcacctccgagcaaggcgggccgtgtgtaaaagcttgcttccccagccagcactgcagggccctgaggtggtcgtgtccctgccctcaattcttgaagcaccagctccctgccccaccctccagtgcctgaggcagctaggggcttctgctctcatctctgaccagcagaatccacccggtgaccagtggtggcccctcagcccaccctcccggcagctcagcctgtggctcttgaggccgtggttcccacgtggactgggaggcagtctcagccacccggggtgctgttcagctgcccctccctgccatcagcaggtgggtgaggggttgcccactgggtgggggcccgtgctaggagtcaccacatgctccaacctcccactgctccctgtcaggggcccaggctgccatcactggaggctgcagggaccaagaggccatcaccgtgtctatagagagcagacagaagcagaacagagcccggggctcctgagcctctgcgtgtgccctcccagcccacaccagtgctctcggccactgagcacccagactcaggcttgggttccccagccttattggaaggcagctcccgcataccaggataacccccgcaaaccacatagcagacccccgccatcctcgcagagtgggagaggctgcagcaaggctttgcctctgcagaccccatcttagtggcacggtgcttgggcctgtgtccccgggtggtggaaccctgtaccggtctgtggccctagggtccctgctctgtctgccccggcccgtgctgtccgctgggtgaggcaggctcccccgtgccctgcctccctctgtcagggaacctgggaccccctccccactgcctgcacagaggaccctgaccctcggccagcagggtggccccaggtccatgttgggcactagggcaggttccgtgccagagtcgggggccacacgagggcctggtgccggtgaggggggcgtgcgctagagggggaaaggggcccccggccacctgtccaccgtgtgggccgtgctgtgtccttatgtcattgtaatataaatacagatttttatatctc

SEQ ID NO: 195 - DNA, 3331 bp, Homo sapiens
agggattcttctgcctccacttcaggttttagcagcttggtgctaaattgctgtctcaaaatgcagaggatctaatttgcagaggaaaacagccaaagaaggaagaggaggaaaaggaaaaaaaaaggggtatattgtggatgctctacttttcttggaaatgcaaaagattatgcatatttctgtcctcctttctcctgttttatggggactgatttttggtgtctcttctaacagcatacagataggggggctatttcctaggggcgccgatcaagaatacagtgcatttcgagtagggatggttcagttttccacttcggagttcagactgacaccccacatcgacaatttggaggtggcaaacagcttcgcagtcactaatgctttctgctcccagttttcgagaggagtctatgctatttttggattttatgacaagaagtctgtaaataccatcacatcattttgcggaacactccacgtctccttcatcactcccagcttcccaacagatggcacacatccatttgtcattcagatgagacccgacctcaaaggagctctccttagcttgattgaatactatcaatgggacaagtttgcatacctctatgacagtgacagaggcttatcaacactgcaagctgtgctggattctgctgctgaaaagaaatggcaagtgactgctatcaatgtgggaaacattaacaatgacaagaaagatgagatgtaccgatcactttttcaagatctggagttaaaaaaggaacggcgtgtaattctggactgtgaaagggataaagtaaacgacattgtagaccaggttattaccattggaaaacacgttaaagggtaccactacatcattgcaaatctggaatttactgatggagacctattaaaaatccagtttggaggtgcaaatgtctctggatttcagatagtggactatgatgattcgttggtatctaaatttatagaaagatggtcaacactggaagaaaaagaataccctggagctcacacaacaacaattaagtatacttctgctctgacctatgatgccgttcaagtgatgactgaagccttccgcaacctaaggaagcaaagaattgaaatctcccgaagggggaatgcaggagactgtctggcaaacccagcagtgccctggggacaaggtgtagaaatagaaagggccctcaaacaggttcaggttgaaggtctctcaggaaatataaagtttgaccagaatggaaaaagaataaactatacaattaacatcatggagctcaaaactaatgggccccggaagattggctactggagtgaagtggacaaaatggttgttacccttactgagctcccttctggaaatgacacctctgggcttgagaataagactgttgttgtcaccacaattttggaatctccgtatgttatgatgaagaaaaatcatgaaatgcttgaaggcaatgagcgctatgagggctactgtgttgacctggctgcagaaatcgccaaacattgtgggttcaagtacaagttgacaattgttggtgatggcaagtatggggccagggatgcagacacgaaaatttggaatgggatggttggagaacttgtatatgggaaagctgatattgcaattgctccattaactattacccttgtgagagaagaggtgattgacttctcaaagcccttcatgagcctcgggatatctatcatgatcaagaagcctcagaagtccaaaccaggagtgttttcctttcttgatcctttagcctatgagatctggatgtgcattgtttttgcctacattggggtcagtgtagttttattcctggtcagcagatttagcccctacgagtggcacactgaggagtttgaagatggaagagaaacacaaagtagtgaatcaactaatgaatttgggatttttaatagtctctggttttccttgggtgcctttatgcggcaaggatgcgatatttcgccaagatccctctctgggcgcattgttggaggtgtgtggtggttctttaccctgatcataatctcctcctacacggctaacttagctgccttcctgactgtagagaggatggtgtctcccatcgaaagtgctgaggatctttctaagcaaacagaaattgcttatggaacattagactctggctccactaaagagtttttcaggagatctaaaattgcagtgtttgataaaatgtggacctacatgcggagtgcggagccctctgtgtttgtgaggactacggccgaaggggtggctagagtgcggaagtccaaagggaaatatgcctacttgttggagtccacgatgaacgagtacattgagcaaaggaagccttgcgacaccatgaaagttggtggaaacctggattccaaaggctatggcatcgcaacacctaaaggatcctcattaggaaccccagtaaatcttgcagtattgaaactcagtgagcaaggcgtcttagacaagctgaaaaacaaatggtggtacgataaaggtgaatgtggagccaaggactctggaagtaaggaaaagaccagtgccctcagtctgagcaacgttgctggagtattctacatccttgtcgggggccttggtttggcaatgctggtggctttgattgagttctgttacaagtcaagggccgaggcgaaacgaatgaaggtggcaaagaatgcacagaatattaacccatcttcctcgcagaattcacagaattttgcaacttataaggaaggttacaacgtatatggcatcgaaagtgttaaaatttaggggatgaccttgaatgatgccatgaggaacaaggcaaggctgtcaattacaggaagtactggagaaaatggacgtgttatgactccagaatttcccaaagcagtgcatgctgtcccttacgtgagtcctggcatgggaatgaatgtcagtgtgactgatctctcgtgattgataagaaccttttgagtgccttacacaatggttttcttgtgtgtttattgtcaaagtggtgagaggcatccagtatcttgaagacttttctttcagccaagaattcttaaatatgtggagttcatcttgaattgtaaggaatgattaattaaaacacaacatctttttctactcgagttacagacaaagcgtggtggacatgcacagctaacatggaagtactataatttacctgaagtctttgtacagacaacaaacctgtttctgcagccactattgttagtctcttgattcataatgacttaagcacacttgacatcaactgcatcaagatgtgacatgttttat

SEQ ID NO: 196 - DNA, 1782 bp, Homo sapiens
gaattccggaaatgaccctgcccgggggcccaacgggcatggcgcggccggggggcgcgaggccctgcagcccggggctggagcgggccccgcgccggagtgtcggggagctgcgcctgctcttcgaggcgcgctgtgcggcggtcgctgcggccgccgccgcgggggagccccgggcccgcggggccaagcggcgtgggggacaggtccccaacgggcttccgcgggctcccccggccccggtgatccctcagctgaccgtgacagccgaggagcccgacgtgcccccgaccagccctgggccgccggagcgggagagggactgcctcccggcagcgggctcttcgcacctgcagcagccgcgccgcctttccacctcgtcggtctcctccactggctcctcgtcgctgctcgaggactcggaggacgacctgctgagcgacagtgagagccggagccgcggcaacgtgcagctggaagcgggcgaggacgtgggtcagaaaaaccactggcagaagatccggaccatggtcaatctgccggtcataagccctttcaagaagcgctacgcctgggtgcagctggcagggcacactgggagttttaaggcggcgggcaccagcgggctgatcctgaagcgctgctcggagccggagcgctactgcctggcgcggctgatggctgacgcgctgcgcggctgcgtgcctgccttccacggcgtggtggagcgcgacggcgaaagctacctgcagctgcaggacctgctcgatggcttcgacggaccttgtgtgctcgactgcaaaatgggcgtcaggacttacctagaggaggagctgaccaaggcccgtgagcggcccaagctgcggaaggacatgtacaagaaaatgctggcggtggatcctgaagctcccacggaggaggagcacgcgcagcgcgccgtcaccaagccgcgctacatgcagtggcgggaaggcatcagctccagcaccaccctcggcttccgcatcgagggcatcaagaaagcggacggctcctgcagcaccgacttcaagactacgcgaagccgagagcaggtgcttcgcgtctttgaagagtttgtgcaaggagatgaggaagtgctgaggcggtatctgaaccgcctgcagcagatccgggacaccctggaggtatccgagttcttcaggaggcacgaggtgatcggcagctcgctcctctttgtgcacgatcactgccatcgcgccggcgtgtggctcatcgacttcggcaagaccacgcccctccccgatggccagatcctggaccaccggcggccctgggaggagggcaaccgcgaggacggctatttgctggggctggacaatctcattggcatcctggccagcctggctgagagatgaggctggactcctgtccccgcgggccgctcacctgacatgtggacctgcagctttgtccccactgtgcatgccggcttgagactggagccccgcggtgcagggcagttcaccgggtcctgcaggaccaggtgccagccactaagggggggcaccgccgatgccaggggttttgcccacccgggccccagcgttcccagagccaaatgacactaacttatagaaggggagggggcaaagggcttcttcctcaggccagctcttctgaggaggctctgccctctccagaggtgccagaccgcggattttatttagcaagcccagaccttccggtctaacgtctcacaccacgacggactccccttcctaataaaactcaaagacaaaa

SEQ ID NO: 197 - DNA, 81826 bp, Homo sapiens
  misc_feature (1)..(81826): where n may be a or g or c or t/u, unknown, or other
acggagttgttgaattgtgccgataccattccacaggaccaccttgcccatgctccgaatcgacctcgtccccgggacctctagaacgacctgcagcattcaactgtttgtgcctccccatagaaagaaacgaagattcagaatggtcaagatcacaaagagttgagtggcagagcagatcttgcagctttgcactgcaattcattggccagaacactgccccntttaagacatatgggctaggtctggaaaaaagctactactccccttagagtggtgtttggggttaaattctctaaaaggattcaaactggaaggctagagcctcgtttaaaacccaaacaaaacccaaacaagcaaaacccctactttctagtgcatttgtgggctcaaagacagcaggggaaatctctaaacactcctcttgaatcactctgtatcatgtttctgaggctgtgttaatttgctctagtaaagaaatcatgtctgaaatagtagctgtgatgataattacccactaggtaagttacctgctaggtagttacccactaggtaaggccaccgtcatgatgtattgggtttatgcaagggctccaaggattcattgagtgaggctgtgagaggattaccctccttgttgcttttaaaactctgatagtgtaaccagtctgtgcaatcctcccaggatgtgacattggttttttgctgcttttggtttactattttggccagagtttaggaggagcagtttcaggggctactagttggcccttcctaccataaagatcttattccagaagtcagggaacaaccacaagatggtctgtgggcccgctgggcccactgtgagatgaccttgagtcagaaccctatttatcactttccctcatatacctcctttctaaactggaaggccttaataccatgttgggacctctgataccagctcagttcagatctggtatccaactgtccttgcaaaatctgagtactcttcttccccagtgcacggttaccctggtggatggccataggtacctttatgaggataatttaaaagacatatgtaatccttggtatgtagtggcatcacagttactaagatgtgtgtgtgtgtgtgtgtgtgtgtgtgtgtgtgagagagagagagagagatagagagagggagagagagagagactaggtccccttgaaggaggatttctgtctccatatatacacatacatatatatatacacacacacatacatatatgtatgttttttatgatttttgtatacatattataacgtatacatattatgcatgttttatattatttgtacatacatatgataagtatgatttgtatatacatatgtatatgtatatatagtatatgtgtgtatataaatggagagatatatgtatgcatgtgtacatacatatgtatatatatgtatatggatatggatgtgtatgtatatacatgtatatacatatacatctgtatgtatgcacttttaccattttgctatcccatcatctttaatgatattagagaggccaattccccagaaacacctcatattcttaacccacctcacagagaacaaccaccaccaggtatctctgagacaccagtgtgcaccctcaccagtgtggtccttatggcttcaatgaaagccaatgaaaagagtgccctctgggccttcccaggcaacagagtatgatggtgggttcttcaatttcatgtaatagattcattttaaggttcaaatctctctgtgccttctgacttcttcctcaaaatcatgccacagaaattctggcatctccacctcatatgccacaggacatcattgtgtccaagatttgagaatccatgtcagcagagtattagacaagctcctggtttcctttctaggaaattgattcccaagtcaagaatgtgtgtatcgatgtcaataaattcttctctcttcagccttacatcccccaacttaatctgatgcctttcagatttactcccatatgtgtttccttgatttctgatgatacttaatgcccaggtcctataattcttttggttagtaacctatatttcctaccatagctaggatctgaactatgctgagacctgatcttagtcatttgcctgaaaataatgagcagagggaagatcaatctgggatgagggcaagcactatcttgtgaggtttttgtctcaaatgaggtctttatcaattctccatgcaagcatagtttgtgctcctctggcaagagggaggtactacttctgcctgtgtagagcttgcttctgcctgtgtaaagctacttgcaagactcctgcctacataaactttcctcccaaattagtcatgataaactagtgattatcttgacaaactatattatgcagcattaatcaaatagaaaatcttagtggcttaggaaataaaagttgtatatatgtttagagacaagaatctcattctgtaacccaggctggagcgcagcggtgatatggtttggctctgtgtcccgaggcaaatcttgtgtggaattgtaattcctcagcgttggaggagggatctggtgggaggtaactgaatcatgtgagtggatttcccctttgctgttcttgtgatagtgagtgagttctcacaagatctggttgtttgaaagtgtgtagcacttccacctgctctctctcttcctcttgctccagccacgtaggacatgccggcttctctttcaccttctgtcatgattataagtttcctgaggtctttccagccatgctccctgtacagccggtgaaaccgtgagccaattaaacctcttttctttataaattatccagtcagaggtaattctttatagcaatgtgagaacgaactaataaagtggtgcgattatgactcactgaagcctccaactcctgggctcaagtgatcctcccatctcagccctcagagtagctgggaatacaggtgtgtaccactatactcagctatttttaaatttttttttgtagacgtagagccttactatgttgcccaggctggtctcaaactcctagtctcaagcaatcctcctgtctcagccacccaaaatgctaggattataggtgtgagccaccatggccagcctaaaatttgatttcctgcttaagcaaagtctactgaggtttgtgtaactatttggagcatttacctccagcaattcagcttgttctgtcttgtggcaactctctcatgatgtacttctaccacaggacagaaggagtagactactagagaaatttccaccagcaattaaatgttccagtctgaaaatgatatttgtcacttcttcactcaaccctctggctagaagtagtcagatgccccactgcccaccacccaactctgcaaggagttggactgtgggaaaatggaaccctcccatatgttcagaagagacaaaatgacatacacctagaacgctctaccatgatgtcactgattttacctaaaaccacttttggaatccataaatggggcaagggaaatggattcccctcccccaccccagtttatatggtataaattccatgtgaatagagaatagttgagttttttgtatatcctcatttcccacatgaacattttttatattgtctacttcccatttcaaatttgaaaagcagtctctgtaagggtggcgttgtcatcagaaagtaacaataataaatatagaaagtgtataaaacagtagaaacaaggttgactttattccaaacataaaacacttattttgtgttagaagagttatcccttgcctatccagggtgacaccagtgactgcacatgtgttcttgagctgcttttcctccggcaaagactcatgtctcctgtctctttctgtcttgaaaggatatgtttgtcactgaagctgctctctgggatcaacgtcagagttgcatactctagaaaagatctttgcaactctggcctatatgaatccataagccacaaacttgactttttgtacccaccatttgtggaactaaattatatcagtacaaaaagggctacattctaaatagtaaaaaaatatgcaaactgaggtataaataagattatattctgtgtatcagtgactctagaggttaaaaatgactgagaaaatagacagttcttcaggaaaacacctcctttggactcacaccatgtgttttccattcaaattagtaatgttcaatttttcctgcagttgaaccagctattagctttctggagagtcaaaattctcttcgttttaggatcaaatttgtattgtcttgttccatgaaagaaatagaaaaatcctagaaacaaaacaaaagagacttactacattatacaagtagtttctaggtttaacttgaattcttgagaaaccaattcatctgtgagcacagatatttttggcatttgctgttccaactaacaataatgatgttattgctacggcaatgaaatggaggaaatacatgtatattcacttaccatctttcatgaaaactgcatcaactttgtggccaattccaggaaagtcatgtgctatcattttgggataacctggatccatagatcgtttatattcatcatacctggtcagaaaagagttaagagtgtcagaccttttgctaaacatgtgcactctgaaagtcattacagaaaatacacaatgaggaatttaaccagaatatttcattttatagatcatttgtgaaatggggagtggatgggataaggtggaatgttgggtgaactaaaaggcctttaaggcccctctgaaatccagcatcgaattctccagtaggttctacgctatgtcctatcgaggtaacatactatggaagataagtaacttttggccaaagtagctccgttaagatgaatgtcctcaattctacatccttttaaaattcatccccctacattctctggattcccagtgcaggcattgtgtgatgattatcggtcaatagactaaatagatgatagattggcaccagccatctgaaggaaaggatgccggccaaggcagtttgagactcactttgaaatgggctattctagaactttttatgtagaaagaactgaggccctaacattctctgcacttaaacttacctccagtatttgttagcaacaaagaagtaggtttttccagtgttttcctcagaaagagcagcatcgatatgcttcacagttctagggaagccaaaggagctgtagatgtccttggggtatccgtgtagcacattctgtccctgaacagcccagtacttattccctgccaatcaagaaagagtgataaaacacttgcctaagacttcaataggcagtaagtgaattttcagctaagttcttagtttcacatgctagtgcagtaccctggctgcagattagaatcatctagggagatttttgaaaatactgatgccaggaccctatcccagaccaattaaatgtgtctatctttggaagcttcttagttgattctaatctgcagcaagctttgagaatgacttgtttatggagttgggggcttctttccacagtcagatgttcaaatgactaaagagttagttatgccaccttggtgatataaacttcggttctccaggtttgctcatggactgtggaagttcaaaccatttgtatcataaagggtgaagtgctgtagtgactcataacctgtaagggtttgcaatcctggattcaaatcactgcatttgactagaagatagttccaaatacttgaattaatgctgtgtccagattccgtgtttatactcagtaagcccctcatcacataaagctggtctcatatactaaagccaagatttctgttactgtacacacgtgctatttacccctcatgaaaaaggaatttgaaactttctgtctctaacatccatttaatttcataatttaaaggctaaaaatcctgtttcaaagcgtttggcccatctgacctgcatttaattctttgccttgagtgtatggctgagtcaaatgtcttactcattgtactacgttaaacacacgtttgcaaaaatattggtgcgtggcatagtgtctcgagttttactttgagtactcccaggaatatggagggggttttaaatacatagtttgtgcagaaaatatttttgtaaatctagattcattaaaaaggccagaacgttctatctccagtcatttgccttttgtttaaaatgactccaaaatgcgctacgcaccgtttagttaagttgatggactttcattgatttggttggtgagactgagattttcaaaagtccctggagagaatgtagctagtaaccttatatctcagccccaaagggaatgaaaaattgatttattaaagcagtgaaaaataattagaaagattacctttgaaaaaccggacttcatctctgtcggcaaattcgtaagcagcttcaagcccatttggcagttgtggccagaaaacagaaatgaaattgagctcaacttccgggtagaagggatttgtgcgcatgtagaatctgattaggaaaataagcaagaaaagtttccatctaatttctggtaatctctggcagatatccagctccagctccttcttgttgctggcactagtggtgtgctggtaaatgtataacattcagctctccaaagaagggttggtttatagcatttgctgatttcactagcttgaaatactcccattatgatgaatttcaagagtctcagtggagcaccattgtatagcatacaaataaaataggcataagtaactttaagaacataaataagtagaaaaatgcagtaaaaattatgacaaactgatgaatttttattatttttattaccttttattttaatgtaatttaattttgtttatataatttaagttttatctcttttttatttatttacttttttgagacagagtctcactctctcacccaggctggagtgtagtggtacaatcttggctcagagcaacctctgcctcccagattcaaggattctcctgcctcagcctcctgagtagctgggattacaggtacaggccaacacgcccagctaatttttgtacttttagtagagacagggtttcaccatattggccaggctggtcttgaactcctgatctcaaatgattcccccgcctccgcctcccaaagtgctgcgattacaagtgtgagccactgcacctggcctataatttaatttttaataatggctatggttcacagctagcttgcaaaattcttcaaaatttaacagtcagctttggtgagccattagggatcggctgtgcacattaccaactggaccatgactctaatatcctattatttagtgattacttacaacacaccaggcccattccttacatcagaccttatcacaaggacactacaagagagtatttgaggatgagaaattgaggttggggagactaagggaggtgtctaaggccacccagctggtaagaggctaaggttgatttttaaactccgctctggcagccaatccctttgttgtcccttggttagtagtatttacacaaagtggattatagagcttaatagggactagggtaacagcacagcatagactgttatgtgggctgacacagaagagctccagattccaggccacagggaagcctacggccttggctgtcggaaacctgacttctaggtccagtccttcctctgcctggctgtgatgccttaggcaaatcagttactatctctatctctagcctttcatgtctcctcgacatggcgacatttaaatgatctctgtgtcctttcaattctggcaaatcctcaaattggtcctgttccatctagtaatatttggtttgataggtgtgtcctgttgtactgagaggtttcctttaaaaccatgtgttttcttaacttgtcccagcattgaaccacaccctgtatagtttacctccagccttatcttttacacttaaaaagtaaagagagggcagaaagaattatgagccagtgccctgaattctaggagagatgcgactacagagtagtaaaacagtgccacagcacttgagaggctgcagagaatgagcctttcaggccaccctgaatttctatgtgttgatctttctgtggactgcatcattcaccaaatgcggtgtgcaataacacaccaaaagagtgtgttattattttgcctgatcctttaggaatcactatggtacagagagcaggcctcctccttgcatgtgagatgaccccaactttttgagtccacatgctgcagagggagttctaggattcttctttgaagagggaagcaccacgttgtggctgcccctatctgtcccaggagggatttcatcagttcttggggactttcccagcattggtgccctctcttctcttcttctctgggcctccagggggcaacagagacccttcaagttaataggctttgggagggccatttttccaggatggcaggggagataattaaaggatggctatgcaaccctcatcagtgagatgttgctatggaaaggaccactttctcctaagaaagtccaatgatacttatcaccataaagagtggcataatgaaaagagacctgaaatagggaacagaagaccaataactgctctgctaccaatgagctctatgcccccaaaagatctctttccttctctctgacttactttgctaatctgtaaaaaaagatcatacatactgattttctaaatcaactatattttctgagaatcagttgacctaatacatgtagaaaaacaaagttgttacaagtacattatgttgcacaaatgcatgtggttgctaccatgtgattatagatgtaaatcagcatgaaataagtaacatgtgaagcataatagttaatcatagtggtgaatgttgttattattacaaatgcagatcacaaagaagaactgacatcttacctgtctttaaagaacatcacttctccccgaatcgtagttatagcatcaaaggttagcttactgtcacacgcttttggggtttgtgggccgatgggctggacaggattttgggaacgtcctaaggaaaataaaatacctggagttagttttgcctagtattagaaaactacataaacaatgaagacagcttcttcaaggatatcgctaatggctgttttatttgaaatacatataaagaccaccaggcccttgtccgtaatgtttttccccatactcaccatatatggcttggatgccatcaatgtcatcctgagctagctgaacatcaccactgaaggtgtagctagggtacatcaaagccccgatatcagtagaatgggagagtccaagagaatggccgagttcatgagccgcaacacgatgtaagttgtactctaaaaaggccaataaatcaatttgtaattatttgaaaggtattcagttttgaggcatttaactaataaataatttacaactacaaggactcatgttactattttatcagtgacttttgaaatatatgcatgtatatcttttttccgaaggcagaaggcatgcatttattaataacgaagagacatgttgaaacctaaactctatgattacattgataaaattaaaagacaaactcagctgactgaaagcgcaccacagattaatcaatattatcaatgattaaatgacacgtactatttcacacagaagcaaaatgttctattaacatttaatatttttctttttctttttttctttcttgagacggagtcttgctctgtcacccaggctggagggcagtggcatgatcttggctcactgcaacctctgcctcctgggttcaggcggttctcctgcctcagcctcctgagtagctgagattacagacgtgtgccaccatgcctgtctaatttttatatttttagaagagacagggtttcaccatattggtcaggctggtgtcaaactcctgacgttgtgatctgcctgccttggcctcccaaagtgctgggattacaggcatgagccactgcgcccagcctaatatttaatatttttcttatttacaaaactgataaatgttgactgctggaaattttggaaaacacaaaaagccttccttttctttaatttccacataagtttatgaccgctgttaaatttcactgttttcttctaatgaaaaagtttcaatgttgatgcccacaattaaaacatcaaagttttcaacaattttcttaataaaaattttagagtggcctagttgtcactgctaagatgttgttagctagcagaaaagaccgctctttcacttttctaagtgtatcactaattttctgagtggtaatagaaaaatatatacttctatgaatgcattctttcaactaaatcaaccaatattacaatgaaacatgaaggggtgggagaattgagagaggcaaatttgattggcttacctctgaaattgttggtccacctttcatcttcatcaaaatgagcatcccctccaatacctgggcctggttgaaaagcatgagcaagatttcctccaggtccatcaaaaggagagttgtcccgatgatctgaaagaaacaattcaacaaagattccttgtggttcttatgtaagctaagccagaagggcaagcattagctttgttaagaggccaacagacttccatcaactgtgatgcagtttccctcttcgagcccataaaatcaacattcatcttaaacaatcaattccagttgcaaagctacgagatctaggggcaaggtgaggttaaggtgctataagaagaacttacctcccctgacaaaagatatcatgatgtctgcttgaccctcagagaccttggtgaatgtcagaggtgtgacattactccagagttggaaggctttctcaatggcatggtccacatctgctcttggcaaatctggcgtgtaattttcaatccttagaatgaaacaaaatagagacacattggacatgacttcttaccactgtcatgggaaatagctctctcactctggccctcagtctgcctacctgtaggtcagatgtgtttgctcccagcgagggttcccctcagtgaggacaaactgagccacatcaggcactccacatctgggctgcttcatcaccttcagggtttcagcatctggtttcccagtcactttcagcccaaagaattcctgcatttgcttcaatttttcaaccactgggccactatttctccgcttttcaacttgcctcccatcattcttcaggttgtagtatttttccaggtatttctgacaaaagaaaattatcgaaacactgcatgggaaatctttctcattattctaaaaattgatggcattaagttttagccaaaacagagaactgcttttaaaccttgtgtttagatttcgcagttgcttttatccttatttttggtgagaaatgaaatttcagagtagaaatgtccctactattagttattgtgaagtaagaacttcatagtagagcaatttttgtagagcaagatttgcatactgttacaagtctacaatttgtggagacaagtttggatgttgttcctttagttcactctcacctccaactggaaaaagagagcgtatgcatggctagatacattttgggtggagggtgctgtttctagcaaaaaaaaaaaaatctctttataagaaacctatccttaaaaaactctattacattactgcagaaaaatacaaactaaaaatttacattattgtcacacgcaatgcagcatttacctggactaagtccacatcttgctcttgtgtttctagagtcgctgggaagctgtgagacaccacaccccagaacagcagcagcagcagtggaggaaagctgtgcatactggcctttgtcttctttctcagtgcaaggtaagtgatggcttcccagcctcttgctgctccaatatcccagctaggaagctccctctgtatatatagagtccttgcccttccagaaagccagaggctgtctgactcatgctttataacatcctcttgattagctatgaatagactaggcaatcattagaaatggtgactcctagcagattatttggaatcacttggtgttgcaatgtcatgattaacttcaaacaagatgtgtgcgaaggagacacactctgccatgtaaacagtggttttctccaattcatttctttcctatttgagaaaggttcttgttatatacacaggtcaaagagtactccatggtctttttgaaaaagactggttctgatggtcataaggtgctacaggtttctccacacaccttgctcccagggcagagggtggaattactaacactgcgcacctgatggctgttcggcacctgtactgactgaagttcagctcccccagcactcactttacggtggctcttcggggttctctgaggttcccttctgcctttgttaagctgcctggtaccctattgcgatagcaccatggcttcccttaatctttactcagagccaggcatggtggctcaagcctataatcccagaatttcaggaggccgaggcaggggaatcacttgagcccaggagttcaagatcagcctgggcaacatggtgagaccccatctctgtaaaaaacaaacaaacaaacaaacattttttaaagttagccaagcatggagtcatgcacctgtagtcctagtccctgaagaggctgaggtgggaggatcacttgggcctgggaggttgaggctgcattgagctgtgattgtgccgctgcactccagcctaggcaacagagagggaccctgtctaaaataaaatttgaaaaaatttactcaggcctaggatttaagagccttacctgagaagacccctcatccacaggcggagtatgagataactccccaccccttgcccatcattatcatgggacaaataggatccttccctgaaacttgtctgaatgtaccggatgatgaaaaggctggaaagagactgagcgtgactctggggtcttatttttaatcatacttgtttcccttgatatgagtctatcttcgctccttggtgctaggcagcatttatttattctttcatgtatgcattcattcatatatttatgcattcctccattcaaaagatcttatttagcatctcctgcccattaaaataaatacatggctctgtaatgaaagatgtgtattcctgtacttatgttccacattaaattgtcttgggtactggtgaccggtgtcaccagtgctatctgtagcattcctggtaagaaaagttggtttatctctgtagctcccctactcatgccccactctccttccttggaagcatttattgaaaacatacagtggagaaacactggcctgttttatcacttcagcaccttatggtgtctcccacctttcccactgtatcaggtttgcttttcaacactttcctccccttatggattcctgttttctttctgcgtcaagactgatatcttactcataaacaatacttcagtatatcttggattgatttgagataagtcatatcctttctaattatttaactacaatttcctcatctaagtggcataacatgtgagttcaagagggtaagaagaatgggaagacattctcacgaaaaggaaatcctcttctcagaggcatcagagggagggtgcggcagagaccaaagaacacttgccactgaagtgactccagcacagacaaagaaaatagtgaaaggggctcttcatattagagggtgaacatagactatgttttaaaagtcaaggagtggcagatatactcgactgtgagggaatctagtcactgtgaagacgtgacaagcctagctccactgaggcctgggaaacaagggtgagttaataggttaactcaggaaagcagcatgtgaccatctgtgattggacaggaaattgcctaagacgtcaccctggaagagtctcatacactgtcccatctggcaagagcctgcacatcctgcaatgtagaagttttcaaacttttataaacctctgtatcctttacttaaacaaaatcccttttggaaagcaaatttgaaaaccaggtgaaaacagaagttctctgatggaagttggaaatagagccttggagtcccccacaacccgccacatcatgcctgctttttcctcccttctctagcaaagctccctgcatctgagtccagagctctcatgctaaatgctcacagtgtttcattaaatgtcatagttgctgacgtggattggaaactggttgcttgaaacatcttttcgttaattttttttcctaaaataaacgaaaaaaattaaattaagttttggttaagcagccagcctagattcacatggccctgaatcttggaatttccagttaggtattcatggaagatcgtctaatacaacatatgtaactttgcagctggtgctagcatatgatttatttgagagtaaaaaagaaaacaaaaatttagaacagaaagctggggattaaatcataccaaatcctagcaatgcctaaacttagcatagtttccaagaagttcaaaacatgttaaagttgtatttgctcttcacatccatactatttgtttcctctgggagcatcttcttcccccataattctcttttaaatgtaattttctgaaattattcctttaccccttatgacaagcataagagggctctcgtgtggctgtgtcagctgactccggactatttccaggcagccagattatttccgtggttttcttggttgcttcatgctggctgctctgtgaaaggcctcaaacatatttgtatttttccatattaaacttagtcttgaaatttcaatcttgcttcatatttttttatgctggggaattcagccgttttaattttgtaactccatttgagtgtcagatattttttctatttttttgtcctgcaagtcttgaaatggtctttagccagaaacattaagtatttaatgctattttgttgtgagagttacacgtgggaaaaatttgccccacggtctgtattcttcctacatatggccatgcagtagctttatggataaccattgaccagacacttaacagacacttggtacacactggttccgtcagtcctcatggttaccttctgggtagaaatgattgatcaattaaccccaagtcccagggcacacagcagagcggtagtcactcgttgaacacagttctgtgccactgcagtccagacataacacatacatactctggggatagaaatcttgcttccctaacagagagaaagtgtctggagacacgaggactgtcacattaactccctcaagtccacaataatgtctccatgccaccacccggtcccacaggcctgaaagaatcctccccttcaagctgtcactcaatctctcttatttcccttatcaaacttgttgaatttatagtttatactacctcaacatagtaggtgtctgcaaatgattgttacatgagttaataaatgaatagatcaatgaagaaatagatacttaaatgacacttaaataaagggtctatttctcattaggctgagttgtttataagaagtcttatgcccatgacttttactctcctaagactaaagtttttaaaattaccatgggaagaatttggatatatcaactgactggacattcaattaactaatttatttatttagagacaaggtctccctctgtcgcttaggctggagtgtagggacctcaaactcttgggcttaagcaatcttcctgcctcagactcccaagtagctagaactacagatgtgcaccaccatgtcccactgatttttaagattttttgtagagatgaggtctcactatgttggccaggctagtctcaaactcctggcctcaagcagttctctcacctcggcctcccagagtgttgggattataggtgtgagccaccacacccagccttactggagattttatatgaagcatagcacatttatttttggtgatttgcatgccatgctacaagcatttagtatcagattattttgagcattttattaatttgtttgtcaataatattttcttatctgcatggtttattaaacactgtggaaaatgcttatagttagcacatttgtgaaacagatttttgcagctatagctccttttaaaggaaattcaaaccaagagactttctggggatgagtgctactcataccatagctcagttcagccctgtcaaaaccgtcctttcccagctcttacatctgtgaatgtgaatttgagatggatttgaaatatgtgaggaagcttcctgtgagattttgatcatgtgcccagactatgacttgcttgtttggagtctgtgacatacacacgtgtgtggcctgcagagcttttagtccatgattcagaattcaaactatattccattgtttcagaatttttctgtttttcacaaagtgaaatgttctctaagcctgctacccagttctttttaattactcttaactacttatgcctcagccataattctttctttatttttttattattatactttttgaggcagagtcttgctctgttgcccaggctggaatgcagtggcataaccatggctcattgcagcctccacctcctgggctcaagtgatcctcccacatcagcctctcaagtagctgggactacagctctcgtacggcaactggggaactacaggtgtatgccaccacacccagctaattgttattattattatttttgtagagacagggtcttgctatgctgttccggctggtctcaaactcctagcctcaagtgatcctccctcatcagcctcctaaagttataatcatttatgatgaccattgggctggtcagctggttttccttgaaccagtcaattctttttctttttttttttctattgagacagagtgtcactctgtcacccaggctagagtgcagtggcatgatcttggctcattgcaacctccacttcccgggctcaagcaattctcctgcctcagcttctcaagtggctgggattacaggcatgtgccaccatgcctggctaagaatcagtcaattcttatgaattctcactgaaagaaataacatttaacctttactgggctctctatacctttaacatacaaaactattttatcctcacaataatcctgtggaatagttagggtggatactattatttccatttcataggtgaagaaactgggacaactttccatgactaaatcttttgtccaagacagttcctctagcaagtagtagagacagaaacttgaaaaaggtctttggctgctaaaccaggtaattcagctcttaagacaaaagattaatccctgcagacatctttttatacttgtcactgagatgcatttttagttctaatagaaaattattgatgaaaccaccaataagactgcacagtccctttttgcttaaactgacatcttctcccgtgaattatacccttctctctcaagggtgtttcttgcccttggcacagattctttccctcatcctgtgaacatggctgctctgtgaaatacatgaaggagcacaaccctaacaattgttgcaacccataactccttgagcatcacttttctctttgtcatcagccttattacttaacttggatcttgaccttgacctcacccccttgtagtacattttcaaacattactattaacatccaccattttaaaaaagtcaaatggcttttcttcagttcacattttcatcagtcctttttagtattcaatgctcagtcttggaaaccctcagcttggagtttctgcactttatttttctccctgtacctttctgattatttcccctcctttgctggtgtctccttccttcccttcctcttgaattttgccattcaccaatgtcctgttttgagtcttcacttttaatctctggccactatttctccaggacagtctcatctattcccacaacttcacccaacatccccacaaaaatgtcttcctaaactcgagccctactgttttcctgaactcctgtctcatagtttccactgccaccaggacacttccatctggatagatctggtttcattttcttttaaaccaagactcctattcctccttatatacttcttacctagcacagcttgctaaatcacagacgtgggttcaaatgccaactctgccaattactagctaaatgaccaattattcaacctttttattttctcatctaaaaaatggaaataataacagcacctgccttagatggttgtttggagactaaaataatacatataaaatatattagtacaatgactggcacacagtgaacacacacaaaatatttgtaattatttttatgaataaaatgcttcagtggtatccattgtctagcacggcaaaaggaacaaccagcagagtaaacagacaacccacagagtgggagaaaatcctcacaattgatatatctgacaaaggactaatatccagaatctgcaacaaactcagataaattagccagaataaaacaaacaatgtcatcaaaaagtgggctaaggacatgaacagacaattctcaaaagaagatatacaaatggccaacaaacatatgaaaatatgctcaacatcacttatgatcagggaaatgcaaatcaaaaccacaatgcgataccaccttaatcctgcaagaatgcccataatcaaaaaatcaaaaaacagtagatgttggcatggatgcagtgaacagggaacacttctacactgctggtgggaatgtaaactagcacagccgctatggaaaacagtgtggaggttccttaaataactaaaagtagaactaccatttgatccagcaattccgctactgagtatctacccagaggaaaagaactaaattatacaaaaaagatacttgcatatgcatgtttataccagcacaattcgcagttgcaaaaatgtggaaccaacccaaatgcccatgaatcaacaagtggataaagaaactgtgatatatatttatcatatatatattttatcatatatcatatatatacattatatatataaaaaaatataacagaatactatatatgatatatataatactctgtatattataatatatatactatatatagagtatatatattatatatgttggaatactattatatgtggtagaatactactcagccataaaaaggaatgaattaatggcatttgcagcaacctggatgagattagagactgttcttctaagtgaagtaaatcaggaatggaaagtcaaacatcttatgttctcactcataagtgggagctaagctgtgaagatgcaaaggcataaaaatgacacaatggactctggggactcaggaggaaagggtgggaagggggtcaggtttagataaaagactacaaattgagtatatactgctcaggtaatgggtgcactaaaatctcacaaatcatcactaaagaacttacacatgtaaccaaacaccacctgttccccagtaacctatagaaataaaaaattaatttttaaaaaaagcaaaacagatataaactaactttagcacttaagaccttccatgctcaggtctaaaaataacttaccggtcccacttccctctcatcctacccccttacaaacaaagtgaattatattttttcccaaatgtgccttgtacctgtcctgcttttttatattttttattctcctctatttctacttaatacaagtctacccattctgcaagacttagtataagggttacttcgctgataatttcctccattacctttctccctttgtgagataggttttttttacagaaagtttttagttttcaatgaacttgtaaacaaaaaaagttcccatttcaaaataaaaacaaaatcccagatcatgcaaatgtttacagtgattatgtttatctaagcaacatggatacatgtttagttgtaagatgttaactaaatttctgtgacaaatatgcttttttaaataacaagaatattataaaattaatgcagagtcctaagaataacctagtagttactaagtttttcttacatcttcattttggacgctgttatttctagcacgaatgagcaggcagagcctttcatatgctcaaacaatggaatatttggttgctatcatatcaattggctttcaagcaacaagacaaccattttaagaatgttttaagtgaagaacttgcaaagcccagggatggaaaaatgctaagaatgcacaattgcgagcacttacaaccatcacaactgtggctgaagactttatctccttcttcttaaatgacatctcaaagtagtatagttcaaaacaaaaggttttaacaaaaaaattggcatttgcccaatttctccactaatttgtgtgagtcaaacatttaattttttcacttgaaaaaaaatgcaatagaaaaccggacatcatgtttcactatctcagttaatattcacgattacagcagctgcaattcaggatgcagcattaccagtgctgcccagagtcagttcatactgaaattaagttcctaacaccaagtagttggttgcaactaccattggctagtgtacatatgaaataaaatttctagcagcaacaaatgcgagatcaaaagcaacagatcatctgctctgcttcttctgttactcagctcgtgcttagaaaccagtgggggtttgggcctgctgaccctgcccactggaagaggctgtctgctgcgctactttcaactttcacattgtccaataaaatgtttagtcgtattggtggttcagggtcctcgaaagaatgcggaatagctgtctgagatacacctcatccgggacttcctcaaagtgtagcccgcgattatagtttaagcacatggcaaattctgcaggaaaccccttacataaaacttcaacaggagtgggcatcttcttttcactaatcttttcatatttttgtttctttgttgcggacctaagtccttgccatggcaagctggttctgttaaaacacatcaaaacagcctaaggattccatatcatctctgtgactctgctcgataccaagatgtgcattgatgctggcacgtcgggcagtgctagtgagatttttatattacctgcacagtatgcgttgccttgtcctgctgttgctgtattttttgaccaaaccagaatcaatacggaataacttactacagtggtgtccaatacctttagggagttatctggtttaacgtctctatgtataaaattgtttgtatgcacatactcaattttattgattgtctggtcagctaacataagcacagttttcattgtgaaccttcttgaagagaaattgaagaggtcttcgaggctaggtcccggaaggtctatgactggtacattgcagtctttttcctgatcataccacggtatgtgggggatgccaagcctaccttgaagaatctcacagagtttgctttcctacagcaactggggatgcctggccttttgagattctagcttcactgccacttgctcgccattggtgatatcgatggccagataaaggtcccagaaggagccagacctgatcttccttactagtttatatttccctcaaacaataaattcggccttggatccgctgctgctcgccatcctaagagatgaagacagaggctgaggccaagtccagacgcctctgagaggaggacggaggcctctggggctcctccacggcggaaggtggcaggaaacgggacatggaacacggaggcctccctcatattcgcggcccggaatcagctgacggggaacctgatcaccgctgctcagtcaggtttcttgttgccaggctgcggtttgtgaaagggttcttgcagttacaaggctgggccacttgtttctgggcggcgccactgccttgctgtctcagctatgtgcaggctggaaaaaggggtgcggtgagctagagcagggataccattgccaccactgccagcagctccagcccggaaggacccctgtccctctgccgacgctgccgtcttgttactccagctccagcccaatagtttcactctgaattttcttagcgcattacactttcttaaagcccttttcatattttccttatcttcacctcattctcttaatggaaggtgatttgttgaaaaaaggctgatgttttcattgtgtccctgcccattctccaaggtttaccagttgctttgtagaaacttgctcaacaggggaaatgttaggttacatgcaatagaatagaaaaagtggcacttagtacttttgagggtaagtgtccctttaagggtaagtgtcccttctttcagtaagagttctttcgctttgcaagtctgagggaaatcctagtgactatgtatgctgaagtggtttgatacggttttgctgtgtccccacccaaatctcatcttgaattgtaggtcccataattctcacatgtcttgggagtggtcccgtgggaagtaattaaatcatggggacgggtcttttcccgtgctattcttgtgatagtgaataagtctcacaagatgtgatggttttcaaaagggggagttcccctgcacatgctctcttacctagtaccatgtaagaccctgactttgctcctcattcgccttctgccaggattgtgaggcctccccagccatgtggaactatgaatcaattaaatctctttcctttttaaattacctggtctcaggtatgtctttattagcagcgtgagaacagactaatacatggttaaacccaagaaaccacagtgaactctcaaagaaaatatatttatcagactgtctcagtatatgtggaccacatgttagttaagtatcccctagacttttgtatgaacaaattgaaagcaagtagactgaactcactcccacttagtaagcacgtctgatctacaaggctagaaattgcaaaaataatcagacacgaatttagctcttagaagttaatttgctcatgaaatggatgcagcctaattattgcataaattattatttcttcaagtagctgttaaaatcttaggtgtaattcctattatgccaatgaatatttatgtggtatatatctccaaaaatattatgaaagacagggaaaataagattcaaaatgcaagtgtgtgctttctaggcaatttatccagaaatacaaatttaatcaaagtccttttttactattctttaagttctggcatttcttactactgataatagatcttgtcacattggcataactaatatctgttgggcattcttggagaggtaagtggagagggacttaaaggatttgtgtggttagacagctgtctggactatttcaataagccctgcctgcgagggtcctttgttgggtcttggggagctgataaaagtgaatgattcttaagccattttatacaccaaaacatgagtaggtatttgttgggatttggcttaagactgaggacatgcaactattcagtttcagaatcacatactgcattgtggagaattttggagattcgttctatttcagaaaggagaccaaattacctactctccaaatcgtctcataaaaaaatttaatcctagagatcaattgaaaaggaaatcaacttctgcttccctgtttcatattagtggtccttgaagttagggtaatataaatgtattatttcccatttaaatcacatgcaatgaaaagagtttctgacacagaatagcagaatacatgctaaataagagttagatttattatttttatttttgtgtgtgctttctcaactaaattcaatttcaggtaaaatgcagagatagcctcagtctatcaccctgcaactagactctgtgcgttctgcagtgaagctgataaaagacagtgccctatctttaggcacagcctagttctcctctgcggtcttgggaaagaaaactaggtttccaggccacacagctttcaaaagtagaatgcctgtggtggtgtagaagaatgtatatagatagaatgcatgggacaaaatagtttttatagaaatcttctctgaggattatagccagaacccctcagaaaactctatcttaaaagctacacaactagagcttctgtttgttttcttccatggctttaaggctcagcttgaggtcataagcccccatcaggtcccccagtgtcttctgttactgagctcttctagcgccctgctgtctacgttgtaagagcaaatctacatactatttacatggaaggttagcgcagtctttctataaaaaggtaccagtgcatgttacatattttacctacacacacttggatctttatgactcaatatctgtaaatatacccgtctatgtaactatacatacataggtgtatttaacacagtcccagcaaaataatatatacatataattctatagacagagtatgtcataggataatatattgagatataaaattatattttcctctatatttttccctgactttgccaagaactgtgtatctcctagtctcagaggtgtcttcaggacttcagttgaaacctacatgaaggcaatatctctttccaacttttggaaaagcctgagctcataggaagaggttgtcagatgtcttcaactaagaggggaaaggaaaaaggtttcagggaggcatgagagagggagaggtttccttaaactggaaagagacatctgggctgtttccaccaggcataaagacccatgctctacttctaggtccctggaaactcctggggtagttgtgaggtgggcctagggaggcaggatcccgcagatctggatccttaagagtgtgtgagtgaggaaaaatggaaactcatacgttgtcttctccaaaactccagtaggtggcagaatggaaatttaaacccagggctcattccaaagtcaatgcacgttccaatctcagtgctttttagatgtagtaagtgaagatagttatctcgtatgtggaagggggatgtgtaggggatgtatatttcaagtattctccaaaggatgtgatagacaaagtgcagaatttggaattaaatgatacaggtttgaatcacagcagagcaatcttgggtgttatctgcaaaaaggaaataataatgcttacaccatttatttatgatgtaattgaactgataagtactttgcaaattgaatgactacatatgttgtttttactaccttctgacctttaagactgtttcccatgatcaggtactacacagcaataaaaggtaaacaggaattcacagacatgtaactcatttccttagtctatggcattttcttgaactaaaaaaagaaatttgtctctagaatattaatcaaaatactacctgtatacatgtattacaaattctatatactcccattcactagtactccaagcagcttgattacaaatgttgaattaccagatgtacacagaaacagaatatagaactggaaacagcattcttgtgtgaaaaaaaaaactgatttttgtataaggcagatttggattcaaaaactgagtttgcaacttttgagacttacattcttgggtatgttaacctctctaatactgttttctcacctatacagtggaaataataacattaatatccagcatgacagttttgaggataattaaatccccacatgcaacgtacatcatgcttgtcacataatagcagctcaataaatattaatttctcttagagtggaaagacacctaaaatcacctactttattactcttacattgcagatgaggaaattgagcccctaaattttcatttgtttttatttcattgggagcaaaacttttggaactatggctcaagtgtcttgattagaatatttcaacacactaaatatttatactaaatgattttctaggatgcaaattaagtatgattcttgaggaaattgttataatgcaatgaggtaaaacaagtccattggaatataattttccgttaaatgtacatcatgaagcaacacaatgagttaccttccttaataattttggaatcttgcctgagaggcagccatatgataaagtgtcatattatcatcatcactttcattggcatgagctaaatgtgattctaagaataaatgcaaaggcagcagattccttagttgcataaatcatggccaggaagtcatgcatcataattcccacctttagttttatcttaggaaagtgaaaatgttcccttaatcatgaggattcttgatgaatatagttatattaagaatcagcttcctgttacgctgtgatctgtcacttacgaggaccataccccagggtggaatcttccccagagcagctcttttttctactgacctacagggtttatgtgacttatgtggatcctcacgtacctctctttggtaaattcttgaaaggccagggtgtttatagccatatattttttgcccctttatgaagcacctttaatctatttcagaaatgcttcagatatttactttttgtgcaaggtaaattagccaagtatgttaacagtttaattttttgttgatagcctggctactttcaaaatagatttgctgctgcagctgaataattattcactgactgaattaattgattaatgggctttgaggataattttcacaattgttacatttatttaaagaaatttaatgttcataattagaaaattacttcatattcttccctctacactataactcagaaaagaccatctttcctactgtagtcaaaccctgtaatttcctagatatgacatgttctctcatatcttaatgccattgcctatgctcttcctttcctcttcacacttggcctgatagactcctactacttcttcacacccaggatcaagcattgctgccttgccaaacttattcattcattcaacaaaagtttaatgagcatcgactaagtcaggggcttgatgctgggcatcgtccaatgtgcccatgtgggatgcattcaagtggacagctgcagtgggctgtgtgtgaatggacgcacataagaggaggaatgaacacagccagtaggcagagttggcaaggtctcagaatgtccccaaagatggtaacccctgagctgggtcttcaagtgcaagacaaataggagaacagtgtgatcattttcatcaggaaccatttgattggaaggcaatccttccattcggttggaatgccaaactgaattaaagggaggattattttaaagaaccagaggaatctgatggaatccattaatgagaagcactttgaagggaggcactgggcaagtggagttagatttcttagaaccctccaccagctttcctcactggtctttaactcatttctcaccactcagaacactatcattcctgttaccatctgggtggggcagagcattcaactgttgcaattcagccaggtacatgactaatttctagacacatcttgggtagtctgaacgtgaataacagattgtaggccttcttttcttttctcttttcttttccctccctccctctctctttctctctttctttctttctctctttcttctttccttctttctttcctcccttccttccttccttctttctacctttctaattatactttaagttctaagatacatgtgcagaacatgcaggtttgttacataggtatacatgtgccatggtggtttgctgtacccatcaacccgtcatctacattagatatttctcctaatgttatcccttcccttgcccccaactccccgacaggccctggtgtgtgatgtccccctccctgtgccgatatgttctcattgttcaattcccacttatgaatgagagcatgaggtgtttggttttctgttcctgtgttagtctatggaaaatggtggtttccagcttcattcatatgcctgcaaaggacaggaactcattcttttttatgactgcatagtattccgtggtgtatatgtgtcacattttctttatctagtctatcattgatgggcatttgggttggttccaagtctttgctattgtgaatgtgctgcagtatacatacgtgtacatgtgtctttatagcagaatgatttataatcctttgggtatatacccagcaatgggattgctgggtcaaatggtatttctggttctggaaccctgaggaatcgccacactgtcttccacaatggttgaactaatttacactcccaccaaccgtgtaaaagtgttcctatttctccacatcctcttcagcatctgttgtttcctgactttgtaatgattgccattctaactggtgtgaaatggtatctcattgtggttttgatttgcatttctgtaatgaccaatgatgacgagctttttttcatatgtttattggccacataaatgtcttcttttgagaaatgtctattcatatcctttgcccactttttgatggtttttttttttcttgtaaatttaagttccttgtagatgctggatattagccctttgtcagatggatagactgcaaaaactttctcccattctgtaggttgcctgttcactctaatgatagtttctttagctgtgcagaagcgctttagtttaattagatcctgtttgtcaattttggcttctgttgccattgcttttggtgttttagtcatgaagtctttgtccatgcctgtgtcctgaatggtattgcctagattttcttctagggttttttatggttttaggtcttttatttaaggctttaatccatcttgagttaatttttgtataaggtgaaggaaggggtctagtttcagttttctgcatatggctagccagttttcccaacatcatttattaaatagggaattctttccccattgcttgtttttgtcaggtttgtcaaagatcagatggttgtagatgtgtgatgttacttctgaggcctctgttctgttccattggtctatatatctgttttggtatcagtaccaagctgttttggttactgtaaccttgtagtatagtttgaagtcaggtaacgtgattcctctagctttgttctttttgcttaggattgtcttggctatttttggttccatatgaaatttaaagtagtttttttccaattctgttaagaaagtcaatggtagcttgatggggatggcattgaatctatatattactttggtcagtatggccattttcgtgatattgattcttcttatccatgagcatggaatgttttttcatttgtttgtgtcctctcatttccttgagcagtggtttgtagttctccttgaagaggtccttcatatcccttgtaagttggattcctaggtattttattctctttgtagcaattgtgaacgggtgttcactcatgatttggctctctgtttgtctattattggtgtataggaatgctcctgatttttgcacattgattttgtatcctgaaactttgctgaagtttcttatcagcttaaggagtttttgggctgagatgatgggttttctaaatacacaatcacgtcatctgcaaacagacaatttgacttcctctcttcctatttgaatatgctttatttctttctcttgcatgattgccctgctatctttcaatattgccctgcaataactttcaacactatgttgaataggagtggtgagagagtgtatcctttgtcttgtgctggttttcaaagggaatgcttccagcttttgcccattcagtattatattggctgtgggtttgtcataaatagctctcattattttgagatacgttccatcaatacctactttatttagtgtttttagcatgaaagagtgttgaattttatcaaaagtcttctctgcatctattgaaataatcatgtggtttttgccattggttctgtttatgtgatggattacatttattgatttgcgtatgttgaaccagccttgcatcccagggatgaagctgacttgatcattgtggataaggtttttaatgtgctgctggatttggtttgccagtattttattgaggattttcgcatcgatgttcatcatggatattagcctaaaattttctttttttgttgtgtctctgccaggttttggtatcagagtgatgctggtctcacaaaatgagttagggaggagtccctccttttctattggaatagtttcagaaggaatggtaccagctcctttttgtacctctggtagaatccggctgtgaatttgtctgatcctgggctttttatggttggtaggctattaattactgcctcaatttcagagcttgttattggtctattcagggattcgacttcttcctggtttagtcttgggcgggtgtatatgtccaggaatgtatccatttcttctagattttctagtttatttgcatagaggtatttatactattctctgatggtagtttgcatttctgtgggatcagtggtattctccctttatcattttttattgtgcctatttgattcttctcttttcttctttattagtcttgctagtcgtcgatctcttttgttaatcttttcaaaaaaccagctcctggatttattggttttttgaagggtttttttgtgtctctatctcctgcaggtctgctctaaccttagttatttactgtcttctgctaacttttgaattttttgctcttgcttctctagctcttttaattgagatgttagggtgtcgattttagatcttcctggttttctcgtgtgggcacttagtgctataaatttccctcttaacactgctttagctgtgccccagagattctggtacattgtgtctttttttctcattcgtttcaaagaacttatttattcctaccttaatttcgttatttacccagtagtcatttaggaacaggttgttcagtttccatgtagttgtttggctttgagtgagtttcttaatcctgaatcctaatttgattgcactgtggtctgagagactgttttttattatttccattattttgcatttgctgaggagggttttactttgaattatgtggtcaattttagaaaaagtgctatgtggtgctgagaagaatgtatattctgttgatttggggtggaaagttctgtatatgtctattaggtccacttggtccagagctgagttcaagtcctgaatatccttgttaattttctgtctccttgatctaatgttgacagtgggctgttaaattttcctgcttttattgtgtgggagtctaagtctctttgtaggtctctaagaagttgctttatgaatctgggtgctcctgttttggctgcatatatatttaggatagttagttcttcatgttgtattgatacctttaccattatgtaatgcccttgtttgtcttttttgatctttgttagtataaagtctgttttatcagagactaggattgcaacccctgctttttttttttttttttttttttttttttttgctttccatttacttggtaaatatttctctatccctttattttgagcctatgtgtgtatttgcatgtgagatgggtcttctgaatacagcgcaccaatgggccttgactctttatctaatttgccagtctgtgtcttttaattggggtatttagctcatttacatttaaggttaatattgttttgtgtgaatttgatcctgtcattatgatgctagctggttattttgcccgttagttgatgcagtttcttcatagtgtaggtggtctttacaatttggtatgcttttgcagtggctagtaccggtttttcctttccatatttagtacttccttctggagctcttgtaaggcaggcctgatggtgacaaaatccctcagcatttgcttgtctgtaaatgattttatttctccttcacttatgaagcttagtttggctggatatgaaattctgggttgaaaattcttttctttaagaatgttgaatattggcccccattctcttctggcttgtagggtttctgcagagagatccactgttagtgtaatgagcttccctttgtgggtaacccgacctttctctctggctgctcttaacattttttcctccatttcatcttggtgaatctgatgattatgtgtcttggggttgctcttctcagggagtatctttgtagtgttctctgtatttcccgaatttgaatgttggcctgtcttactaggttgaggaagttctcttggataatatcatgaagtgtgttttccaacttgattccattcccccgtcactttcaggtacaccaatcaaacgtaggtttggtcttttcacatagtcccatatttcttggaggctttgttcattcctttttattatttcttctctaatcttatcttcatgttttatttcattaagttgatcttcaatctctgatatcctttcttccacttgattgatttagctattgatacttgtgtatgcttcacgaagttcttgtgttgtgtttttcaactctatcaggtcatttatgttcttctctaaactggttattctagttagcagtttctgtaaccttttatcaaggttcttagcttccttgcattgggttggaacatgttcttttagcttggtggagtctgttattacccaccatctgaagactacttctgtcaattcatgaaactcgttctctgtccagttttgttcccttgctggcgaggagttgtgatcctttggaggagaagaggcattctggtttttggaattttcagcctttttgtgctgttttttcctcatcttcgtggatttatctacctttggtctttgacgttggtgacctttggatggggtttttatgtgggtgtcctttttgttgatgttgatgctattgctttctgtttgttagtttttattctgacattgagggctctcttctgcaggtctgctggagtttgctggaggtccactccagaccctgtttgcctagctatcaccagcagaggctgcagaacagcaaagattgctgtctgctccttcctctggaagcttcgtcacagaggggcacctgccagatgccagcaggagctctcctgtatgaggtgtctgttgacccctgctaggagatgtttcccagtcaggaggcatgagggtcagggacccacttgaggaggcagtttgtcccttagcggagctcaagcactgtgccgggagatctgctgctctcttcagagctgacaggcaggaatgtttaagtttgctgaagctgtgcccacagctgctccttcccccaggggctctgtcccagggagatgagagttttaatctataagcccctgactggggcttctgcctttctttcagagatgccctgcccagagaggaggaatctagagaggcaatctggctgcagtggcttcaccacactggtttcacacccagttcacttcctggtggctttgtttacactatgaggggaaaacagcctactggagcctcactaatggtggatgcccctccctgcaccaagcttgggcgtcccaggtcgacttcggactactgtgctggcagtgagaatttcaaaccagtgggtcttagcttgttgggctccgtgagggtgggatccgctgagaagaccactcggctctctggcttcagcccccttttcaggggagtgcatggttctgtcccgctggtgttccaggcaccactggggtacaaaaaaaaaaaaaaaaaaaaaaaaaactcctgcagctagctttgtgtctgctcaaatggccacctagttttgtgcttgaaacctagggccctggtggtgtaggcacctgaggaatttcctggtctgcggtttacaaagaccatggaaaagtgtagtgtctgctctggagtgcactgttcctcatggtacagtccctgacggcacagtcccttatggcttcccttggctaggggaaggagttttccaaccgcttgtacttcccaggtgaggtgacgccccaccctgctcctgcttaccctccgtgggctgcatccattgtctaaccagtcccaatgagatgaaccacgtacctcagttgcaaatgcagaaatcacccagcttctgcattggtctcactaggagctgcagaccagagctgttcttactcggccatcttgcctctcagtctcaggccttctttattttttgacttattttacttacttactcattttctgtaaggaaatctggattataacatgttcctttcattagagactttagattatgaggaataatcaacaccttcaaatacatttactttttatccaaagaccttaaaacttcaccctcaggaagcccatggcttgggttccaggacacagtttaatacagatggcaggtaatcagctgatttttccccctcctcaagtactggcttcactttgacatggtattttacgctgccctcctgggacccccaccaccaattccgcatatcctctgagggtctgtggcttgncaacccacttttaacttatgtctaagcctaaaatctttttgttgggagatcatttacaggggatttatagtaaggaacttgaggattctcatgggatctaatctcaggacagccttcttgagaaatggaaagattacaagctctgtctctgtctctcattctctcccccatccctctgccttctctgtgtttctctctttttcttacatagacttaacctgaatgtttgctattttttctttctgtaggctccttcaaactgatgctccccctccgtaacatcagcctgtgtgtgactaggacttgctatggttctaattctggttccaatcctagttcatcttatgaatttgatcatggacatgtgttctgggtctatcatttctaattctgggaaagagcacatgacaggctctgctttattcttgtgttcatctctaatccaattaactagagccatactggtgaggttgctggtacaaacattattgtctaggtctgccatatccatggggactttggaggacatgtcagagaaggaaaaacaaataggcatgcataacaaacatatcattcacaatattctaggcagtgggtacagcgaccttgagggctggagaaagaagagagcttggtacatatagggaacttcaagtggttcagaatggctggagtgtagcatttggggtaggagataataagagatgagatggatcagtaaccagggctggaattatgaagggctttgataccctgctaaggagtcgaagtagataaaaagtcaggttttctctcctttcttggcttttacatcctataccatctatttggaagagataccacccctcctttccttgacttactaagcatttgccctttgggtctcagcttaaatgtaccttttcgaaaatccttccctgatctctgaagcctggttagttgctatgtgtttccccagctctgtgtgcctgcactaaatagtactcatatcctgtaacctgcttgcctgttcacttttctctctctcctgctagagtataagcaggaatcctgtctgaatatatcttttatccatagcgcagtgcctggcaatcacagacattctgtaaatgtcctgtttaaggaatgaatacatcaatgaatgaatgagatggacacaaatcaagcaacctcaagtatccctttccttgcttgaggttaagcctggccttgcttcttagttagactgactgaagccctctcagcctctaatccttgaggaatgaagaccctcctgcagattctctggtcccaacctggggactctgaatattctccccagacaccactctcttccctgctccttcctctggaagcttcatcccagaggggtgagaagggttttaaaaaggggtttccctgcacaggctctctttgcctgctcccatccatgtaagacatgactgctcctccttgccttctgccatgattgtgccagatgccagccggagctctcctgtatgaggtgtcctttacacctgcccacttcctacatgatcaatctagattagtttcctaatgtcattctgtattttgccatcttaatcctttctcttttccaatcacttctccctcatttccttccttgagaaaggaaataaacttaaatagtcctccactcatcggctgcgcatcctaggagcatctatgaagagttcacacttttctgtcccaaactgtccatcttaccagcacatcacgtgtatataaacattgaatatatgtatataaatgtatatatctatatataaatattataattcctactgttgactctcacaaatatcaacaagcagcaacctataattatagattatacacatacaatctatatataggttatatagattatatataatatatgctatcctgctttattccattaatgattgtggtgttgcattctattacaaaggaagagtggcaaaatatgaacttatattgtagatgttttctaattcaatattgaaatgcctcaagactcagtccttggatctcttcacttcttttttcttactacattgttaaactcatccattctcaagccttaaaatcatctatgtgctgataactcccaaatttatgtctccaatccaggccttttccctaaactgcatactcctatatccaacatctctacttggatgtcaaatagacctctcaaacacacaatgtgtccaaaatggaacctctaatcttgccccaactccctgctccacccacagccttccacgtttcaggtgatggcaacttggcagcttcatcctttcagttgctcagtccaaaagacttgaagtcatcctaaactcctctctctttctcacacttcccagccagtctgtcattaaatcctgctggttccaccctctaatatatccttctctccatttccactgttcccgtcctgattggagtcaccatcctctcttggccggaatactgcagtagcttcctcataggtctctgtgaatctaccctttctcccatacaatctaacctagcagagcaccagaggctcttctgctccacaccttccaatgcccacccccatttcactcacagtgaaagcccgtgtttatattggcccaatacccccactcactttgccttccacctcaacccttatccctgggactttatcttctagcacttccactcccctcccaccttttgattgttgtaagtagtcctcttgctgtcctttgaccatcatgatcacactccatcttaggatcctccactctagctgttattcaggctggagtgcttttttcctagattcacttggcaagctctctcgccttctcccagtctttgttcagatatcatcttctccacgaggcttactttgagcaccctactgcaactgtcaccaccccaagccctctttgcttgcaatcccaacctcactctactttttctattttccattgtacttatctccttctaatatatgacataagttatttatttgctattatctgtctctcttgtttgaatgcaagttctaagaagacaaagatctttgtttttttcactgattgatatggtttggctgtgttcccctgacaaatctcatcttgaattcccacatgttatgggagggacccagtgggaggtaattgaatcatgggggcaggtctttcttgtgctgttctcatgctagtgaataagtctcacaagatctgatggttttaaaaaggggagtttccctgcacaagctctctttgcctgctgccatccatataagacatgactgctcctcctaagcttctgccatgattgtgagttctcctcagccatgtgcaactgtaagttcattaaacctctttcttttgtaaattgcctagtcttgggtatgtctttatcagcagcatgaatatgaactaatacactgatttatcaaagctcttagaagtgcttggcatataatgagtgcttagtgaatattgtcgaaagaatgaatgaatgaaaaagcaaattaatatctcctaccctgtctgctctttatgtatctccatatcagtggtataattctcaattgtgagctcccgaaaggtagaaagcatttttgtcctttcttagcagagcaggattttgacctaaatttctgcaaactataatcttatggttatgactctttttgtaagttgatcactcattcacaaggatgtaatttgcatctgattaatcacaagactgatgtggtctcagaacattgagaaaaagactacttcatctacctgacagtcaaagggtaacacattaggacttgagagataataaattcaaaggaagttcacacacagaaaaatttaagattaaattgtcattttcagataaatttgttagggatattggttcagtattctgcagcagatgcataaaatatttccatgcctttaagaatccatttgtagtctcagataccacatgtgttccaggagtgtagatgtcctgcacagtactcttttatgagtcactcaagcttctcctgtggcatcagattttgcagtgattttgtaatggacatttcctaattgagaaattatcagctatttttgaattatgaaatggctacattacttagaaataggcccttgggtgcacatgagatatttcattaccaggcgtaagatttattttattaataggaaaataatataaaatgtcacttaaaggatcttatcaaaattatgaaccttccacttctgaatgtctgtattatacatccattcctaggtcacctaaacttacccctttgactcaacctgctacaaagagccaaccacttcctctactccagctgtttctttattccaactcttgccctattatgtcactcagtctgttctttgctctatctcttttgctcttaatcacatttataggctgtattagttcattcttatgctgctaataaagacatacccaagactgggaaatttataaaggaaagagttttaatggacgcataattccatatggctgaggaggatttacaatcatggcagagggcaaaggaggggcaaaggcttgtcttacatggtggcaagcaagagggcatgtgtaagggaagtactctttataaaaccatcagatctcatgagacttatgcactgtcgtgagaatagcatgggaaaaactcacctccatgattcagttacctcccagtgagtccctctcacaacacatgtggattatgggagctacaattcaagttgagatttgggtggggacacagccataccatatcattccacccctggcccctcccaaatctcatgtcctcacatttcaaaactaatcatgccttcccaacagtcccccaaagtctgaactcatttcagcattaactcaaaagtccacagtccaaagtctcatctaagacaggcaagtcccttctgccaaaagcaagttagttacttcctagatacaatgtgggtaccaggcattgggtaaatatacctgctccaaatgggaaaaattggccaaaacaaaggggctacagtcccctggaaagtctaaaatccaacagggcagtcattaaaccttaaagttacaaaatgatctcctttaactccatgtctcacatccaggtcatgctgatgcaagaggtgggctcccacagccttgggcagctctgcctctgtggctttgcagggtatggcccccatttttgctgctttcactggctgacattgagtgtggcttttccaggtgcacagtgcaaactgtcattggatctaccattctggggtctgcaggacagtgggcctcttctcacagctccactaagcagtgtcccagtggggactctttgtgggtgctccaaccccacatttcacttccacactgccctagagagtttctccatgagggctccacccctgcagcaaacttcttgcctggacatccaggcatttccatgcatcttctgaaatctaggcagagattcccaaatctcaattcttgacttctctgtacccacaggcccaacactacttggaagtttccaaggcttggggcttgcaccctctgaagcaattgcctgagctgtatgttggccctttttagctacagctggagtggctgggacgcacggcatcaagtcccaaggctgtgcacagcaaagggggggtcctggccctggcccgcagaaccatttttccctcccaggcctctgggcctgtgatgggaagggctgccatgaaggtctctgacatgccctggagacattttccccattgtcttggtgattaacatttggctccttgttttatataagtttctgcaacaggtatgaatttctcctcagaaaaaaagtttttctctcctatctcattgtcaggctgcaaattttcaaaacttttatatcccatcacctcttgaatgcttagccacttagaaatttgttcccctagataccctaaatcatctctcctaagttcaaaattccacacacctgtagggcaagggcaaaatgccaccagtctctttgcatagcaagagtgacctggccaggtgcagtggctcatgcctgtaatcccagcactttgggaggccaaggcgggcagatcatgaggtcagattgagaccatcttggctaacaaggtgaaaccctgtctctactaaaaatacaaaaaattagctaggcacggtggcaggtgcctgtagtcccagctacttgggaggctgaggcaggagaatggcgtgaacccaggaggtggagcttgcagtgagccaagattgcgccactgcagtccagcctgggtgacagagctagactccttctcagaaaaataaataaaagagtggcctccagttcccaacaggatcctcatctctatctgagacaacctcagcatcgacctttttgtccaaatcactgacagcattttggtcaaagccattcaacaagtctctaggaagttccaaatttcccacaccttcctgtcttctaagccctctgagtctctaggaagtttcaaacttttccacattttcatatcttctgagccctccaaactgttccaacctagcctgttacccagttccaaagtcacttccacattttcgggtatctttacagtagcaccccactctactgataccaacttactgtattagtctgttctcacactgctaataaagacatacccaagactgggtaatttataaaggaaagaagtttgatagactgacagttccacatgactgaggaggcctcacaatcatggcagaaggcaaaggaggagcaaaggcacatgttacatggtggcaggcaagagagcgtgcataagggaattgctctttataaaaccatcagatcttgtgagccttactcactctcatgtgaacaacacaggaaaaactcacccccttgattcagttacctcccaacaggtcctttccatgatacatgtggattatgggagcaacaactcaagataagatttgggtggggatacagccacaccatatcataggttaattcatgttaacttaaagaatagagaggcagcaaagtggatgtaacataagcttggtgtcagactagatgcattagatatctggctctgccatttactatctgtatgaccttgaggatgttgtgcaatctctctatacatccctatatttgtaaaaaagtttaataatatcttcttcataggtgagaattaaatgagatagtatatacaaagtatttgtttcccttctgtgttaagatagcaatagtaatatacgttagcctttcaattggatttgctaaagtctaagggggccttttttgcatgcctattaatacttagagttttacttttattataataatactccatctattaaagagttaaatcctaagttttcttaatattttaagttcagctttctaatcttgtttattaatctagtatatttatataaaaataagtacaatcattttcactagctttgattaatatttattgatttgtacagtaaaaataataaattaaccttaatcatttaatgctatttgaattcataagtaatattttcatcaacacttcaaatcataattacaatttcaatgtaggtaattttttcagataatgcaagtctattatgcagacttaaaacccaacaagccagatatttctaaacacttaagtaatgcttagtaatctaataaatcaatcaattgactcacttaactcaaattctcatacactttgcaaacaacttaaaaacagaaaatattcaaaatagcagtgactgcaaaacataacacagcataataacattccttaaacaaaagtctcacttgtattcattctctattaaatatatattatacataacatacattatatatgatctacattgtataaatatgtaatacacataaatgctatatagtatatatacattatatacgatactacatggtgtataataaacatgtacattatgcataatatacattatgtacataatgcataatatacatttatacaagtatatatacatatatacacgtatatatgtgtatatacatttttatacacatatatatgtgtatatacatttttatacacatatatatgtatatatacacgtttttatacacgtatatatgtatatacacgtttttntacacgtatatatgtatatacacgtttttatacacgtatatatgtatatacacatatatatgtatatacacgtttttatacacgtatatatacatgtatatataatatacatacataatataatgtatattatgcataatgtaatagagtttcatatattatattagattacattgtagaatataatatattatgtataatatacattacatacattatgtataatatacattacatacattatgtataatatacattatatataatgtacatacatatattccttccagaagtagctaatttgctcccaaccaaagaaaagataattactattttaggtccgctacagccactaaagttttacacacagattattatcagtgattataaaccaaggcaaagggtgtttgtgctgcttccagaatgattctacccaaatcccaggtggttagcaagctggactttttctcataattaaaccctgccaacttcttcaattttacagaaaattgctttcacaagttattcctgccagatctgagtagcttcaatgcactcttcccacagtgctccttcacaataggatcacggctaatctccatattgcttgatttgtgataataggcttcttaaatgcttctgtcattataacccatctgctcactaactggtgagattctgtactttatcgtttatgaacgttctcatttgtgtcaaacccatatttctgttggtttattgctgagtccaaaccagattcccagcttctgctttcctcccctgccccccagtctagtgtccctcccccagtctagtgtccctcccccagtctagtgtcactgcatgatttcctgtaaatgcaaacgtactccaataagcctgcctgaagcaagaggaattgagccagctatcaaacatcattctgggattcagcatcagtcaccattagagctggtcttgtcccgacatgggctacatgtctggtccctggggcttagcctctggtcggtgtcaaattcaggtgaaagccttgtcagcacaaaaatacatacctggaacaaacaaacatttctggaacaagattgcttggggaaatttacagacgagtagctggtgtgaggttctccattgttcattacaatttaggacagcacaaagaaatttagcagggctagatatcagactcaaaagaaccccggcccttgggctgtggggattttaaactgcagaattgaggaagaaccagccccaatgtggtcatgccatatgacactgcagaacccctagttcggaatggagtcaaaactgaaaagataaggcaaccaggctgatttattgtctgggtccctagacaaaataagaacatgatctttgaatctagaaggatatgaaattggatcctggctatgtacttgctatgtgattatggcaatgctactgaattactctaaacttatatttctgcattattgaaatcaactaccagcctaacagttaagacatgcataagaactatgaatcaggtctgatagcacagagaaagtattttccacttccttctcagcacaacatttcctaagaattatttgcatctgttatttcgactttctcacattccagtttctctttgtagtagatggacagagattggtgactcaatgtctttccttcacctcactgtgtaacaaaaacatgactgcagtgaaattgattgatcctccttgccatggtgattggtctaggatgaccatatggtaagggatggtccaaacaggaggacactcagaactgtcctttcgtgtttgaaggtggtgatttaagaaggtgcgttgcctggacactaaacaacatagctgtgttgctgccgtgaggaaagccagcctcaaggtaaaactgacacaaggacagaaccaagataaccgcaaagtgatggagccagaactctgatcgcaccgaaactaaaacctgtcttagtgctgtacttttatgtaatatgaaccagaaaattccttatttttaaatcagttgagattttctgctacctatagccaaaaacaccctaacttgccaacttttctaccagcttcaatcagaattcagctccatcacttcaccaacgctgctgttgtaaagagcatcagtggccctcatgttggagaatccaacaaatagttttcctgctcctgtatctctgctcagcctttgaagattagattttccatccaatatacaagtgtgcttaaggatattcactgtagcgttggatatcacagcaaaatattaaaaaataggctactgatacactgaatactgaaaataatctactgatgcacacaattttatttcatttatgttttattatttttatcttaaatatattttaattttaaatattatataaatatattcaaatgttataaaattattttcttttaatatttacacttatttcaaactaattttattttttgttactttaacattttatttatttggtttttgcatttatttaatgtataaatgtatttattgaatcaccaataggggactgaataagctgcgtatttcttcctttgagcgcagctggtgcaataaacaggagctcgcagagtcccgtggccgcggaggggcgccagactccggggaagagccagagcgaggtccgacgaatcgggctctgctggcgaccagcccccttcctttcctccctggtggggctggcggtgggtgaccacggccgcatctgggaggcgactcttcggattcaagatgaccaacaaaaaaccctcttccccaaagggttagactgagcgaaacttcaaacggatggcaggagatgaatgaattctaaaatggaaacaatatgaaacacatgcgcaagctttggaggcaagaacgctgacctcaacctcagtgaaaactaaagcaaaagcagcaagagtctgcgcggggcaaacgtccttgcgatgcgactagcagacaagaggcaggagatgcgaggcgtcctacccgaatttagtacctccagcaaatctgtggcccagcgtggcccgatcaacaatggtagaccgagccatcaacctgttttcctaaaaatgaaaggtgatctggccctgactgaagacaaacgggaacaagcccaaaatgaacagagtgcctggaagtttacgcctggtaggtaaactctccagtcatattctcagtcaaggcttccctgacagtcccactactagaaagtcactggggggacagccaaggactcgtttctacaccaacactcagactttttgagaggaaaggaaaaaagccgcatttttatactccccagctcctaatggttaatgtgaaacttaccaatgaaccttgcacttcagttctttccctccccatccgctttgcttcagaagcctggtagacttgcactatcccaaagaagcggccacctctgaagaattcctctttgggaacatgtggatacttgagaaatgtttctgtttgaagaaaatagagggagaaacaaggtcctaaggcacacaatgtctttggacagttcggagaaatgaaaacctggagactttaaatcatgaattgaacataaattccagtaaaatggaaaatggactatgcattgctcttacccttgagcatagtgacttagaaactctaaagagcaggtcttcaaataacatggattagttatgacgtcgaagagaaaaaaaatccatttccggtcagggccatggtctgtgtggagttttcaggttctccctgtgtctttgtggattttctctgggtacttggtttcctcccacatcccacagctgtgcacatgaggctcactggcttgtctacatggtcgcagactggtgagtgtgagtgagtatgagtgcgccctgcgatgatggaatggagtcctatccagggctggcctgagctgccaggatgggctccagccactcaacactctgaactggaacaagaaggtaaataattatcttacttgttttttattaatttttcttaaatgtatgcataactcgcatttatttcaatgtttacttttccttttcttttttttttttttttttttttttgaggcagagtctcactttgtcgcccaggctggagttcagtggcgcgatctcggctcacagcagcctctgcctccctggttcaaacgattttcctgcctcagcctcctgagtagctgggattataggcatatgccaccacgtcttgctgatttttgtatttttagtagagacagggtttcaccatgttggccaggcttgtcttgaactcctgacctcaagtgatctgcccgtcttgacctcccaaagtgctgagattccaggtgtcagccactgtgctgggcctacagtgtttactatttagaagtgttttggtctttagttagaagtttggtgatgtttttgtgacttagaaatatgccatagaaatttaactcttgtttgtatcaattagcctatggtaaaaatggtttccttatgcatccctttgcttaaaatcacagtttccaagaacttatccagatgttaaatgaggacttttcaacatattggttttgccagtaagactgtgaacttcatcattgttgttgaactgctgggtcaaaactcaaatgaggtgaattttgcctttaaagggattatttgctaagaaccaaccttaaatagtcacagaaaatcaaatattagttgtcagtataagtcgttcatatatttaaccatttagtttgaggctctatattacttgattcttttttattgatacataataattgtacatatttatgggaattattgagtcttaaatgaatgtggttttaatcaatggtttacctttgaatggttgtaaatattgtagataatcttattgagaactgtgcaaacatgaaggtgtggtatcaaacttcaggtttaagctgtttgaagcattataaacattcatttcacaaccagattgcttaaggatgttggctgtggtgagactcactgggttatttttttcaggagtgagctttattaaatccgcattccattcggcaggcatgtgctgaaagagcattatcattggtgttaatggacaaatgtgtttttcaattgtatttgggccttttgtattgtggtcttgatattaaattaagtgcacctaaagaaaaaaaaattgaataaagcaattctacatgtactaatgtggaatagctgccaagatacattaagtgaaagaaatcaaagagcaagacagtgtaattttgcatagtaccatttttattttgaaagattatattaatgcttggtatgcgtaaaatagctctggaaggattcaagaaagatctgcttggttacctctgagaaaaggagttagatgttggaaacaggggtgggaggaaaattgtttatattgcataatgtcttttaacgtttggattttgtgttgtggctaaggtagtacctattagaaataaataaaattaggtaattttaaaaataaagaaatgctgtaaattttgaccaaatgttgctattcattagttttatcttaaactctccccatatgatctctcccatacttctggctttaagaataatctcaatgttgaaaccttccatatacatatatgttttatatatatgtgtgtgtctcttttgcatttcagattcctttagctcttgggtgcttgaatttctccaacacatttcaaaaatgggcaaacataaaaaattcatcctaactcttgcccttccttcacaaaccttcttctctccaagtctttccccatctcagtaaatgccgtcaccatcagctcttatgctcaagcaagctacctaggatttactcggaacatttccttttctctcaaattgcatatctaatccatcactaagttctgttatctatctcatatctatagagtctactctcattcctaactctcccgtgtgcccatgtggtccaagccatcatctcccctcttagtctccacacgtcctttcaaaacctccttcaatgccattccctcaaaagttcttctaaaaccatctggttcaaaatagatcctcctattatttttttccctttataactcttatgaaatttacaattgcgtatttatatttgtggttatctacacgtgttcttttcgctggattataatctcgatgagggcaggggcctgtgtctattattttcatattcttatgcctgcaacctagcataatgcctggcatatggaatatgatttgtaaattactctcagatgaatggataagttaaaaacggctcttaccatgtacgaggcattgtgctagagacattagttatggatgataaaccaatgttagaatcgtcatttgccaatgggcatttacatccaggcacaggcagatacaaaatgagtacaagagtatattttaccatgtgaatagggtagatatgaggaagtttgcttgctaggtcaggggagggacctgcactgagggaatttataagtaaaaggaaaagatgaaaaacaagtctgatttcctcaccctgtaaaatgagatgtgcaaacaaggcaatttgctatgattataggattcccttcacagtttttcctagagcctgctctacaatgtcacaacccctctagattttttgccttaggtatgtcaggacacataaaatgtctaggtggtagaaataagcatcctgtttgcagggctcatgaggagggcaagtggtagattctctgcagttctggaacccattgtgaaccccaagccatggagactctagtctactggctgagcatgctcagcccataaagtgcccaaattatgagaacaacttgcccttgaaacaaacaaacacaacaataagataaaataactgacaaatcgtctttattaaataagcaaatagtctacacagatacagtcacttgtctgttgcacacgagtgcttccccttctcttgggaaagatcactctatgtgacaaggtgcaagctaagcagcagcccatttgaatgccctgtaataacataaaaatgaccggcaagatacagattcacgctcaagttcccttgagtgtgactcgagtcacagcacaggcaggagaaaacgaacatttcaattcacagagacttaggtgaagaattattagcttcatttaaagtgcccatattgtgccttctacatatctctttcaacaattaagccagctgttactcttcaaagtgtgtgtcactttctttgcatttgggtcaaactccaactgtgaagatccagtaaagaaataaaagaaccctgcaaatacagacaagggaaatagtaagatatttttccaaataaagacatttgacaatatacaaaactcagaatcatagagaactaaaaatagaaagtgtttatagagctttactttatgtcagggactatgccaagcttgttacatgaatttattttcatttatttctgcaacaaccctatgaggttgtatgtctaactccatttacagattgagcaagttgaggttgagacagatttcgatgcttcctcaaggttactcagcaaggaagaatggagacagcactcggtgccagctctgtctgaaaacacagccagattccaggttacagggttattctgcttccgatcagataaattctccacttgcttggaaactctaatcacctatttctttcttccccaaaaatcctcctcccttttccctgcattgcagcctaggaagcacagcaactatttcaaaacaccaggggaccctttagtgctctgcaaacatggtgatcaggttacctttcaataaagatcatcagcctccacttccttaccttgagtagaaaacaaaatctttttttttttttaaactttgggcacatggaaaggtaagtatttgcaaatgactggcatgggcaatgactgacaactcaggaaagacagacaaaaaatctccctgggaattagtagcagcaataagatagggtggaggagaaggccagctaaccaacattaaacctggccacaccacttgatgggatttttatgctaacatggtaatctgaaagtcgagcttgactccacatgttagctcgagatgtaagtgacactggagcactttgattttatatgcatgtataagataaagtagcgagatttgtgtaattatctttatggttccaaacaagttattttgtgaagtagttctataatgagtacaaatgtaggcgaatcaaaattttgaggagggaactggccctaagaaacacttgttattaaaaagtttcaatgctcctcttccctctgatatcataaaatgtttcaagtgctctatggccaacacagtaagtatcctcttaccaaattcttcaaaaacagcatcaatctttgagtcaatccctggaaagtcttcagctatttgcttgggaaagcctggctccatggaatttctcttctcatcaaatctgtaccaagtaaaagaaacagctcagcattgcatagaggccatgttaccgaacatcttagatcatgttaggtttaatgtggaattttactaaactttataaatactgcaaataaatgccaagcatatttgggactatagaaatatgtgactttaatggtactgtaaagagttctgaaagccatatctccatccggaacaggggccgcatcctgctgtatgtagcacatgctgtttgtcatcatatttcttaagcctggacagaaagaaccttaatcatctttctgtcacaaagacatgaaagtgtgaacatatatataaagtgaattgaatcaacatctaaaatgcaattttaattccctaccacaattggcccatatatgcctgctgtcccctcccctgcacatctaaatcttctctggtggcctcctgggaaaagggattaggataagaagcaaagcacagtaagtgtgtttttagcccattggctggatatcagatggtcggcctcgatgtctcaaagtctggccaaatgacccaggaatcaacctgtctgtgagtgttgggttgtatccataaactggactgctattgatcatcatctcttaaatgagccatcattatcaggtagaggtgacaagtgggtgaggttagaagtagcccttgaaaatcatatagtagtgttaggaagacaaaacaaacacacaatgagacagtgacaaacacacagtgagacagtgagccaaactaaaagacaatgggaagggaacgctaaattgcggtctgggttctcagaacattttcccaatgggtctaaagtccacgagggaaagctgcatggaggtgatgagacttgagccaggacttgaaggatgggcaagatttgaataggttgaggagagaagagggggctccaggcaggtggggtgacagcaccaagggaagcaccagccaactgcacttgggactgaaagcaggagagcctaaggtgctgctgttttaaagtaagaactttcccacagttgtctgaagtcccatccttcctactaagagagaagcaggcctaaggttggggtgggggatttccttagtaaaagaaactaatttccctaattaggctccatacaaagtcatttctcttgcatctcacctccagtatttgtcctctacaaagaaatatgttttgttcttttccttatcagaaatggctgcatcgattttcctcacggttggagggaaacctagggtgtggatgcctcttgggtatccagctcgtacctcatttcctctgatggcccagaattgatttcctgttaaatataaataattcagagtcatattgaattataacagttaagccctttcgctttagaaatacactttagcatctttgattttcatggtaaagtagtagcccaaattttagatttagtcaccagcttacagtgggcttttcacaaaaatttgcagactgaatgaatgaactaaggtcaaatgagagaatttacaactctgggtaatttatcttcttgtctttatttttatcatctatgaaatataaatacaatgatatcagccctggttatttcttcattaccgttgactactgtattagccagaacttgtagtagggaaaattaaagtgttgttcaatttcttatgagagggtttactttggcaagttaaacaaatgatgatatagtaattacctttaaaaatgaaaacgaggtccttgctagtaacttcatatgcggcatccacgcctgaaggaagagatggccaaaatgaagagatcaaatgcaattcaggttcaagcttcctgagggatttgcgccaaaagtgcctaaaatatatgtaaaaagaaatgtaaattgaaaaacaatctttcacctttagaatattttcctcaccgtcttgcctcacccagcttcccccattctctcatcttctaggctggatgacagatagaaatcaggtatattgccattagaaaatttctttcctttttcttcagaagactgtagtgagtctcccgtcataggtttccagagtaatgtcttctatgaaagaaaaattattctatcgtgcaaatgaattagcccagcataagctttaattacctgcaatgtatgcaaaacagtgcgtgtgctataccctcttccaaaagctaggccgtgtttgtatacgtgtatgtgctgtgtaaatatattcttgtatgtgtgtagaaagattctggaaggatgcacaaaaagtcttgactctggatgagtacagggagaactgggaactaaaatttttaatttgcttctcatttgtgctctttgaatgtttgtcatgtgcatattgatccatcagtaagtaaattacttgattaaatgtaatgttgatcctgatgtcatttttaaaggaagtaaaaataaaattattattcgaaagatctactcatgccttttgaaaagtaactgtgacttaagacatttggaaacagcaattagaagctaagaaccagatcagcctgtgccttcaaaaatgaacctgacaattttaggaaaatgtgggaaaaggcagcaccagatctaaatgattccaagctcagaagaaacgtttttgttttaaatgtctaagaatctctatcaagtttctgcgtgttttcctttctaaacattgtagattaaaatggtaggaaaatataatttttcagcctgacctgtctttaaagatcaggatttctcccctcagagtgctgacagcatcaaaggacaaagcaggatcacagttggctggcgtcccaggttctggagggacaggttccgtgggtaccaggggggtctcaggggagtcagggggaggtcctaaagggaacattaggggaaatgtgatacgtttcaatatatgcccatttgtatgctttccaaacattctcacggtgctttgaactaaatcataaatactttatgtagcatttgaaagctcttctgaagaccatcattgcaaaactacaatggctgattttcccagtgtcactcaccatagagggactgaatgccatttatatcatcttgagacaggcggaaccgagtcaggtctgtgagtgagtgatagagtgggtacatcaaagcttcagtgttggctgagtgaaagagacccagggagtggccaatttcatgagcagcaacgagaaataaattggtccctatttaagaaatcgagaacaatagttacttattttttaaatacatgtgcattacacaggtctgctgtgcattgtattggtttttacttcttggaaccacacagggctttttacaccttgtttgttggttaattgaacaattgactaattacacacttaatggaaagctaagtgtattttaaaactcatacctgtaatcaatctttgagattgatttcccagttacatccacttgccccccatggccccaaacccacccccagcctcacaagcatattaactccagaagaaccagatcccttttcttgtactcaggaatggaatgaacccacttgcttagcatatcagatatttaccttcatttgtcaatgcaaagctaaacactgttttaatatatttacatttgccatttgcagtctcagttaaaggaaactatattcatgttaattgataatgtctcagcctcatcatcatgaagtacatattgagactaaaaacatgaataatgatagatgtcataggatttgcaaaattggtttaaaacacagtatgcccaatcatgtctagcatttgtcacacaacagatttagaatacataaacactggctttattcaaaattttttccttcatatttttaaaaacacccataatgctaaaattgggaggcattgggtaattatgatcaatatagtaagtaaatctaccttacttttgctagtattacttgtgtaacttgtgatgctaggaacaatctcatttgagagtttgcaggaaggtttctttacaagaattcgttaactcaaccaatcaagaattctatccaggactaaactcacatttgtacgtcctacagaggtttacattttcattataaatcccagttaaacctcagacatagtattaattgttttcctatttttttagaagtagtgttaattgttttagctgatttttttgaaaactttggatgtcattccccaaaacatacagttatgaactgagaaacattcttctacctaaacagtttgaacgttgtatttgggatttagtctttcccttcaaaacaagcccataaaaattcttttaacctaaaattactaaaataatgcctcagccagaaaaaaaaaaaaaaaaaaacccccagttcctgaattttaatccctaattccgggtttgaaaattaaaaatttaatgggagaaatttccttatttaccccccaaaccactttttattttaaatccggtgcaatatactaccccttaaattttggtatttaaatataaaaaattttccttaataagggttccccccaaatccccaaaaacccgttcttaaaaaaaannnaaaanttattncnatntcntatattgtgcttaccaatataggaaaactgttaaagcatctgaaaaatattttcaataataattaaaacaaaaatatattctgctgatctctgatccactggaaaatccagaacatctcatttcttgagcattcttggttattaacagatttctacatataaaaaaattaatgccaaaatcattctgagagatgtgtaactaacctgttgtatcctttgtccattgttcatcatcatcaaagtgggcatctccattaatccctggcccaggggcataggcatgggccaaaacatttccaggtccatcaaaagggtaaaagtctccatgttctagtaggaaaaaaatttattggaaagatatgtaacaaggatcccttttgagccttttccagtacaacaacaccagatagatgaatggatacatttcatgtgttttttgttttgctttttttttttttttttttttacctctaactgcaaaagagatcattatatcagcctctccttcatacagcctggagaatgtgagtggagtcacctcttcccagactttcagagctttctcaacagcagaatcaacagcatcttttggcaaatctggtgtataattcacaatcctgtaggagaaaaattgaagcagatgctattttctcctatgatatagtttataaaattccaatcttatgtgaaaacccctctgaaccattacctgtatgtaaggtgggttttcctccacttcgggatgccaggaaaggttctgaagtgaccaacgtcaggaactccacacctgggcttgcgcatcacctccagagtgtcggagtccagcttccccgtcacctccaatccaaggaacttctgcatttctcggatttttttaacaacaggaccactgtcctttctcctaacaaactgtttcacatctttttcgaggtcgtagtagttttctagatatttctaacagaataagtatagtttttaggtcactcttacaatttttactatagctatctatttatagtaagtttttgcagttgctcacttcttaatctatttggagtatttctctagcttgctgaaataatgccaaattttataatatgatactagcaacacaaatatttagctaaaattacgttgcattaaaaaaaaaaactgaagctgttccaaagcaagatatggttcatccactctccacttgttactcatgtgccttaagccccagtgctgctactgctatggtgttgtgtgatcttaagaaaacacctaatatttctggcctttgtttcttcctacataagaggagaagcccaaatggtgtgataatgagaccttttccacttccaacactctataactctctattcttgaactgttcctacacagtaagctcaagcattctatgtgggttttaagacacacagaatggtttcagcttactctggaagctccccacctggccaggtcagttagtgttaattacctgaacaaggttcatgctggtgtcctcaccccttgcagctccatccaatggataggctgagcaaactgccacgcacagcaacagtaggattggaagactcttcatttccactggctttacttagctctatgttgtctctatgccttgctgtcttgcctgcctccttgtaggtccaacctcgggagcgcagcttttaaagagtgacagtgtttgtttggatcacccgcagcttgactcatccttgctttcatccaaatggcagcaggaccatttccaaacattccaaattcaaagtaggatgatacaacctactttactaatttctctcaaccttcccaattttgcaaggcaacacagtgattaatctccaggaagtgcttcctgtcttggtagaggagaaaactggagcattttttttcttctggaaaaattgactggaattcactagacaatttatgtttgtccttttgagagaagaagtaggttgacttggtaaaaatcagaattgtgcagaacttctaaaagcagttttattttaagaaagacattataaaagcaaataaaagatgtaagtggaaagtgtacatacatagctatagtctatactatatacaattatactcaaaacataaaagataatatctagaagaaatttagaaggggtgatttatttttctgaatctgatttgtaatgcctgctattgactgtcgttggatttgctggttcttgaggaggaaaacctcatgggcagaatagaacaaagagggtctgtgaaaaagaaggaagtatattccctttgggttggttttaattctgtaaccaatttattaatgggtgatgggcccacgtagctgctccataaatagttgtagaactgaaatgaattacattgcttaccggactgaaattctctctgtccttgtcttctacacatgtcttattctctttcaaccttttcccctcctccctaaattcaaattagcagatgctttgaagttgaagaacagaatccatcctaaattttctcttcatgctcttctgttttcttcctttcctttcttttctgtttctttgtcaagtaaagtgttgctcacattattggtgtataataaatgcttgaatgcaagactctaaacatattcagaggaagacattttgtaaaacttttatagtcctcttgccacctgccaccatccatctcctcaatgcttccctgatcaccacattttgtttgttctttctttctttgctgacttgcttatttgtttgctaaagggaagaacatcttgggagtaagaactcagtagaatgatggatacaaatgtgcatttattagacctttaataagtgcccattttgcttcctctcatttataactcttttgcattttcttctttgctttattttttgtgtgtttcttaataaacattggagagattttacccaataagtttaaagggatttctctgtggcaataagatccctatgactgaagatgcccacacaggtgatagccacttggcagggggctatacatcacatttaagccttcatttttagactagattatgtctaaagactttttcaaattttatttaaaaaatagagacagaggtttcactatgttgcccaggctggtttcgagctctgggctcaagtgattctcctgcctcaacctctcaaagtgctaggattacagacatgggtcacggcacctggcctaaagacattttaaaactagtattctatggttctccattcctttgatggggggaaaaaaccatgtcttgtcctgattgaaatacagggaaaatatttggccacattgatatgaggacaaggagaacagagtggtggcagtgatgtgaattccaggaagaaacagtggagcccaacagataaaatattgagaggttaaaagtgtagaagctgtggcagctctaattccttctatattaaggtttatcctttgtaaattttctctggagttataacttataaaacatatttaaagtttagaggaaagcctgatagataatatgtttgcttttccaactgttaagatgtgattggcaaaatgggccatgctgttcctgaactaaatacaaaagtttgctatattttaaaacagcttcgacgacttccctggaagatgtttcccaagtcccaggaagagtcattaatcattgttcaatggtaccttgtacctgcctctgctactctattttccacactgaactgtagtgaaatggtttatctgtctctctcattctaatgtaagctacttgagggtatggaccatgcctcatttgattctgtattcctagtacttagcatggtatctgatatatagtaggtaaccaaaaattacttagagaactaaataatatattagttatgagtgaaaggctcatagcaaatgtcaaacaggtaaattaaaagtcaaaaaatccaaaaatcatgcagacatttctagatttgcagattctacatgtcatatatactaaatactctaaaaactaaattttttagaagttgtatttccacaagaaaagatcaagctatcatctaaaatctctctaatatataattgaagtcctcattcatatgtctgcagaacactcaaactaatcttgtagaaccagaagttttctaaccgtgcatgagacagtcaaattgcattttgtagagtatgttttaaaaatcaatgcagtaatgagaaggaataggtaaaattaaagagcaactgagtgtaagaaggaacggagggagaaggagggagaagagaaagggggaggaagatgaggggaggggaggaggagagcaaacactccaggtgtagagggaggaactgaatactagcggaaaaaaagtgggcatttccagcaagaaatcaaaatgactgttccacagaacaatcatttgttatatggttaaataaatacaagggtcagataatggctagttttataaatctgacctcccagggatcagcggcttagaattaaatttacattcaatctaatccttggatttaaaaactggcagtgatcccaggtaacattctatctcgtaacttttcacatttgtcttcctatttgtcacacttctccatgactaatcagacatgattgtgcaggatccttgctacctctagctgataactgatataatcattatttcagctatacattcatttatcaagtatctgagtctcaagggcttcagaatacccaaactaagagtatagatttggagataaagtttagaaaattttagtaaaaaaaaaaaagtgaacaaactagctgtttaaaagcaggaaagaaagaagaaaggaaggaagggaaggaggtataggaaggaaggaagggaagaaggtagaggaaggaagaaaggccggccggccgacccgccggccggccccccaacccccacgcacgcacgcccgcccgcacgcacgcacgcacacccgcccggagagaatataacctagccaaggaagaatcccctatataattcattctataagacataagcctggtatggtggctcctacctataacctcagcactttgggagactgagataggaggactgcttgagcccagaagttgaagacccacctaggcaacatagggagacctcagctccacgaaaaaataaaaataattagccacttatggcagtgcacacctgtagtcccagctatttgggaagctgaggcaggaggatcacttgagccctggaagtgagctgtgatggtgccactgcactccagcctgggcaagagagcaagaccctgtctcaaaaaaaaaaaaaagtaaaaagttgtacacgaattaagcagaaggtgcttgcttactttaggtgtttcctttagaaaaaactcatagataaagtagcagataaagtgagcctggaatgatctggaaatggaggaaaattgcttcttggccttttggctaagaacaagggtggaaatggaggaaaattcagtaacagagtatacaagtatgcagagtcaagaaagactctatatggaaaacgtcaaagagttactttttattgaaataaaaggtatgtgaagggtaataatggaaaataaaaaataaagttgtgaaaagataggttggagtccagtcatagaagaccattagtctgtagctaaggtgcttagagcttattccattgttggtggaaagccatgtgatatggtctggctgtgtccccaaccaaatctcatcttgaattgtaactccaacaattcccacatgtcgtgggaagaacccagtgggaggtgattgaattatgggggtgggtcttccctgcgctgttctcatgatagtgaatgagtctcatgagatctgatggtttttaaaatggtagtttccctgcacaagcactttttttgcctgctgccttccacgtaagacatgacttgctcctccttaccttctgccatgattgtgaggctttcccagccacgtgaaactgtaagtccatattaaacctctttttctttccagtctctggtatgtctttatcagcagtgtgaaaacaaactaatacactagtttctacaaaacattttaaataaattttacatacttaaataaaacgttaaatgtttattatagaaaatttagaatatataaaaaagtacaaagaagaaaataaatcttttatagtcatgacccaaaaagaaaaacactactaacagtattaactatgtatttcctctaatttctttatacctgtgtattctttttcacatcatgctgatcatgggagtttataaaatttcatctatattttccacaattttgaatatcactagctggacagaagtactaacaaggcaacatattccatctgaattatagggccatgttgctcagactggtttcaaattcctaggcctgagtgatttgcccaccttggccccgcaaagtgctaagattacagacatgagccactatgcctaacaataaaatattttgatactggtatgcaatatgtagcaatcacattggggtaaatgggggtattcatcacctcaagcattgatcacttccttgtgttacaaacattccaacttattgtttagttattttaaaatgtacaataaattgttgactgtagtcaccctgttgtgctatcaaatactatataatattcattctaactatatttttgtacccattaaccatacccactcccactaccccccactacacttctcagctactggtaaccctcattctactctctatctccatgaatttaattgttttaatttttagatcccacaaataagtgaaaacatgtgaagtttgtctttctgtgccttgcttatttcacttaatgtaatgtcctccagttccgtcaatgttgttgcaaatgacaggtctcgttctttttcatggttgaatgggactccactgtgtatatgtactatgttttctttatcaattcatctgttgacggacacaggttgcttccaaatcttggctattgtgaatagtgctgcagttaacatggaagtgtaaatatctctttgacatgttgatttcatttcctttagataaatattcagtagtggaattgctggatcatatggtaggtctatttttagttttttgagaaacttccgtactgttgtccatggtggttgtactaatttacatcctcaccaaggatgtatgagggttcccgtttctccacatccttgccagaatttgttattgcctgttttttgggaaaaaagccatttttactgggataagatgatatctcattgtagttttgatttgcatttctctgataatcagtgatgttgagcactttttcatatcacataggttttcatagttgaaatcagactatatattctgatttttatgcctatttgccatagaaactttcaaacattctagttggaaggggaattagaatagaaaagggatgaggcacaggtaatttctgcacgtgatggctcagtcttttttcatttataaaagcataatgactcagatcactccacatgagtggtaaaaatgttgaaatctatcacttaaatactttgagaatgacaatagcttttatgtggctccaggcaactctgtttttatggagggaaagagcattttgtaatattcttggcacaaatattccagttatgtaaaacagagtaacataaagttttcagtggttctccaacaggcagtatatttcatctggttgtagggtaaaataatgatgcttgataaacaatttttctcatatgaggattagagtggaagcaggagaacaggtatgaaaaacattacggataaagcttaactccaggctgtcaaatcctgaaaagacacttttcaatcagaaaactgactttttcaaacaagttcagtaaacgtagctccattaagcttttcatagcctgacctatgcattctggaaatgttcgcttttagccagttggcaattgtgtgtctttatgtaaacgttttccaaaggtggttcaggagtgaaatttactgattccagcatgtctgagaatgtcttttgttaaaatatcctatgggaaatatcttaggtgaatatgacactcagttcacaatcgtttttctctcttccaatatcaaaacctgttcagtagagatacagcttcagtgttttctattatagttgatagaaaaatatatgtcctggaccctgagaacaaatatctttctagatctttcagatgacaagaggttcttcaggtttcgtgagacaaacatagacaggcttctgaatattttttctaatataacttcactgtttttataaaaactggaaaaatcattcttaaaaaaagcttttcattttatgtgctctagtgcaagtttgggaaaggctgcttcagtggctactaaggaattgtcctcttagactgaaaattttctatgtgttgctcttgatcagataaatgacatcagaactgtgtttctgtgagatttatctggtggcagtgattgagatggattagaatgtgaagcaaatgaagttgactatttcaggggctgttataatcttccaagtgaggcacaagggcaacccgaaggactgcagatataagtaaaaagaattaagaaaggaaagtgatattacagacagaaaaaggacaggcaagagtagaaaggcatggcttggcattgaggcttgtgaattgggaagaattggaatgagctagtctgtagttaaggttggggtcctttctttatgacttggcagatctttgtctggtgtggaaataaacaaagaccaactaaataggaagaagcaaaggctgtttattcagagcttgccatagcaagggtgtcagctactgttgcttgtgttttggcagagactcaaagacaggtgaaggagaaggaaagctttatagtggaaaaaaatggggataaactggaggctttggaatggggatgctatagggaggctaactagctgtaggcatcctgtgtgattggttaggagggcatatctttctctaagttggaagcagggacaaaaattagggatgctgtcagttattaatcaactcttggtcatttggggccaattgtgatagaagttattgtttagcttcctggattgtcactagaggtaacaatctggcagtgtgcaaatctgacttgcagcaggctggcctgtttattgtagacaataaattcgcctatttattgtagacaagaggattggtttcctgggcagtttgccgcaggttgtgggtcaaagttatatatatatgatctggcagttgtccatttgtacattcagtttctcactgtaaaattgtctcttaattccatggcttaagcatctctgtaaaggatgagtcctgggtatttccttggctcaatgacctcttcttttgctactcacataatttttgcttaaactccggaattcataagtgcttcattccagaggttagatttcttcaaatagttttaaccagtaatgctcgttgccctgacaaatctgtggtaatggtcctaggcgccgcttcacctcagctctgacacagctcatcgtcttctgagtcatgacttcatgaatgctgacacatcctttgaatgggtcacattatgtaagaatgacagaatgaaagtttgtgttgtagtaacagctaaaattaagattggatgtacaccaaggcagagctcactcatacaactccatagagctgctgttggtgagccagcttattccacattaacccatgtggtggaaagaatggaaccagggttctaaactttcattatattttatagtttttggtaattaatgactttgaatcttctcagagtgtgtaatgtggtcaaacagacatatatacgtttatatacacacatatatgtgtgtatatgtctacatatgtgtatgcatacatgtacacatatatatacatgatagttttctcctttcttaaagaacaaaatatatatatatctatgcattgtcattacttttaaaattcaagtttctcaaagttttgttttttacttaatacaaaagtgaactggttcacactattatatatatgtacacactatatatattatatatatatacacacacacacacaagttatatatatataacttgtcctttaagaacataaatatatatataacttattttttatttcattttattttattttttttgaaacagagtctcgctctgttgtccaggcaggagtgcagtggcatgatctcggctcactgcaacctccacctcctgggttcaagcgattctcatgcctcagcctcctgagtagctgaggttacaggcatgtgccactacgccaggctaattttttgtatttttagtagagacagggtttcactatgttgtccaggctggtcttgaactcctggcctcaagcaatccacccgcttcagcttcccaaagtgctgagatcacaggcatgagccaccatgcccaacatatatatatatatatatatatgaaaacacacacacacacacacatatatataagttatatgtatatacaactgtcctttaagaaagaggaaaaccaccatatattgatcatcagttatgtacccaacacgttacatatattatgtctaatctttacacccacattgcaaggtaaagattatatctccatttcacagataaataaattgatcagaaaaagtcaaaaggtttattcaagttcacgtagacggtaagtagcagagatgtacaaacattgtccaatcaaaaccagaacaaacagaaataagagtttgcagtctttagacttatctcaactcctgcttcttatctgtttataacactttcttggcctggacttaaccctttctataaattttatctttcaaattttcatattcttgaaaacagaaacctggaaatgtctcttaactcagtgtctaatggataattagcatcaattttcggggtacctctcatcatttttctaacttccttcccctctctttaagcttggtcttctctgcccatcatcttccactggtgctgcccgaatgtgacccagttaggacccaagtctatgtgcagtcattatgtgtcactatgattcaaaaatacaaagcctcctcattcacgaagattagtaaatattccaaatcctgggaaaagaacaaaatctttctgactgtgaatttgtaagcactcatcaacgtcaacaaaatccaactctaaggttctgagcatacacatccaatccagtacctttgtggtttgatacacatttcacaatccttttttgttttgaaagtcatattttattcaattataagatgggaacatgctgttcaagatcatgaatttagagaataagtggaaaaacctctcctcaaacctcacttacgttcacatctctcttagtattctcatggtaacttgactgctccaaaaattacagaggatgttgataatttaccaacttttacattttgtacctaataattgggccaaatagtatcaaaacatattccttgttaactacaagattatcagccaaaagaatctaagtgctatagtagaaaaagcatgggttttggggttaaacagcccccagttagaatcctagtttctgtactcagtagctctgacaccaaacaaattgcttatcttctctgtgcccctttttcttcactcttaaaaatggcaatttaaatgtctattttatgggcttgatataggtaacagaaattatgtaggaacttctcagaaaataataaacatgattattcatagcaatcagatagctagaatgagggcaaaaaaaaaaatgagttatgtctaactttggatgggcttaagcagttgggaatgagggcaatatggggaaaacgaagagtgaccacatgagttctcttccttctcgacaagtcagagtggttattaggggatgaatgtacttagtgaggaggagagcagcaaaactgggaaattctgggtccagaagaagttgagatgtgaagaaataagtttctttctttatttatttcagcctactaagtgtcagaggctttacctacttaattctcagaacaaatctaaaaggcaggtattgttttccctgagagtcaaagaggtcaataacttgtctaagatcacacagtgagtcacagagcagattttctaacttatcaaaattgtggactttgtataaccagtcactgcccggaactctgcctttcaagatatttgcaacaggttgagacaagccacaccttcacttcctgcaatatagcagacgatatattctgaaggactgttcaccatgaaacaactacaatcttttttttttaattaggtaagcactcaaattacttttatctaataaaataagcaggaattttaagcgtttgctgtttcatcttatacgttattttacctgggccttcatgtatagggtataaaactttaaggaaacattctcaactaacattcttattagatgtaaatgattcatattacaaataatactaacgtaagcattgtcattacttttaaaattcaagtttctcaaagttttatttttacttaatacaaaaatgacctggttcacactatcagctgcccaacaaactgtttaaaaaaaattctttgttaaagagcagattacaagaaatgctttccatctcttatttaaaaaaaagaagattctgatacacataatgaatctaaatcaaaattcataagtggtggctgaaatcctgtcaactttcagtccaatactatagaaatccacagttataatgcataaacaattcaaaattaaagtttatagtggaaatgtcaacaagtcataactagtacacattattactgatgagttgcactatacttcaagcacagtagatgtgcatatctgatagacagactgcttagaaaattaaagctatcagagctataaaaaaggaatacacaaatatgaacatagcaatgccaaaggatttgagccgttaaaaaaaagtgaataatgaggtcaagagatcgagagcatactggccaacatggtgaaaccccatctctactaaaaatacaaaaattagccaggtgtggtggctggcacctgtaatcccagctactcaggaggctgaggcaggagaatcacttgacctgagaggtgaaggttgcagtgagctgagatcgtgccactgcactccagcctggtgacagagtgagactctgtctcaaaaaaaaaaaaaaaaaaagtggataagatgtgatgtaaacacatctgatagatctctctgtaagccactgtccactgatttataaagctatggttttataattcttttaaaaaggaatttttttctacactgatgcatacagtaatttcattgtacattcttgactacaacacaatcttcaaatcctcttgcagagcttgtatgtatcatcagaatttctccagaaagtcagcttgccatattttcagcagcctgtgacagaaaagaacttcttaaacatggcactgtagaataataggctgattaatttaagtacatcaaaattaatttcaaatgatgtcagctgggatggtagagtaaggacctttaaaatgtccttttccataaaaacaagaacattggcagaaacaaaaagtcaaaatcaactttttcagaatcctgaaaatgaatcaactgcatacaacaatcttggcagcaaaaaaagtggctcaatgttcagagagctgctcaacggtggtcttgtaaatgaacaacccacaattacaatgaaaacaagcaacctagcagctgctggcatccaaataaggtaagagctctttcaaagccctatccgaagaattgtcattatttgacctgtctgccggtttcctggaaaacaccactcacaaggcttgtttttatttaacctgattcagaacacacccagtgcaatcaacattttcccaggtcatttgtcaaaaacaatcagcagtagttgtttaacatcatagctgcccgagcagttaaacatttgataattccaaaatgtagtcattccacatttaggaatataccatacagaaactcttgcatttatgttttgtaagttggatggaaatctactgcctcatctgtaatagcaaaagaccagaaataacccagatggtcattggacagtagagtggataaattgtagtatattcatataatgttttataactttattaagcattcaaacatataaaatgctacaactatacttagtattatcaaatattccaaaaataaagtatatatgaattttttaaagggaggaactattatctacttaagaaccaaaatatgagatataaaaagtacatctggggagatgaagaccagtgaagtctggacttgcttgttactagaaaggtagttaggatttgtatataagaccaagagtgcggcagttaaggaaaaaagacatgaggagcgaatgtgcagagggggccactggtatgacaggagagattcaatatgaacgtatcaaatcattgcacaactctaacagtacatttatcagtcactgttttatgtatgtgtcagtggtatagatacatacatatattatatgaaatctctagcatttaatagccacacttcacagatgagtaaaccaagattcagcagattaagtgaccttcacaaagtgatgtggtcaaataattaccaccactggtatccaaatccatctgggatacttgggtcttttaaaataattgatacatttataattataaaatgcccctctgtatacagtgagtctcaaactgtaccatgaatcagtcactcggagggcttgcttgatgaaacagacttctggacttcaattttaaattgattcagtaagtctaaaatgggacctgaaatttgcatttctaataagttcctgatttattgatgctcctggataaggaaccacattaggaaaaccagtttcatatctaatttagctgttattaatgtacccattccatctttcttatgattagtgtttgcatggtatattattttcatccttttacttttaaaataaatgtcattatatttaaagtggttttcttagagacaggaaatagtttcagtctgacaatctcatttcattagagtgtttggacaatttataattaatgtaattatagatatgattggactgagatctattcgcttgctatttgtccctatttgtcccatctgttctttctcccttttccctcttttcagatcttcttttgggattaataaaataatttccagtattccattatatcaacattattggcttattagttatacctctttgtctatttttagtggatttttttagaattaaaatttttatctctatcttttcagagtttaccttcatatagaattataccacttcaattaatacctataagaatctcacatctatattttttctcacatctatatttttcctcacatcctttgtgctattgttgtcatacatttattttacttgtatatatcctgtcaactccataacacatttttatttctttgcttcacatagttatttttaataattaaacatagaaaactgccttttatatttacctatatatttactcattatgatgctcttcgtttctttgtattgatacgttaccagtcattaccattttccttctacttgaaggacttcccttaacatttttttaagggnataacttccccttaacaatttttaacagaattgtcttctgacagtcaattctctcaattattgcttgtctgaaaaagtctgcaccattttttatttttggaagttgttttcactagatattgaattctaaatcgataatgccttttttctttcaacatattaaaagtgtcactccattgtcttctctcgatatgtaagtatatatatatttagagagatttatttatgtaaatataaaagggtatataaaatttataatgttttataatataagagtatgtttatataagattacattttataaatataaatnaagtacaaagtatttttttacatatatagaaaaaagtcaataaatgtttcttaaatatatatattttagaaatatatttttatatatatatatatatttatatatatgtaagacagggtcttgctccgtcacccaggctggagtgcagtggtatgatcatggctcaccttgacctcccaggctcaagcaatcctcccaactcagcctcccaagtagctgggaccacaggtgtgtgccactgctattggctaattttttgtagagacaaggtctccctgtgttgctcaggctggtgtcaaactcctgggctcaagccatcctccaacctcagcctcccaaagtgttgggattagtcaagtgatttacagatcagtttgatcttttcaaagtttgattttaagttttgtttagggtgggtctagtgtacccttatctgtaggaataactgagtcctactattaaagtggcttcactgatttccccaggtgttaaaagacatcttgccattcaggctggatgaaattcaaacctctcctagccctatgtaatctctgagaattgttcagtctacagttccttggtggtgcatatgcagttcagtattcatcagcagactcaaggggtcttctctcccaatttctggagtgcattctctatgtaacttcctcctcttccttacttttccctgaaaattatagccacctctaactccctgaactttaatctctatctctcaactcagtgagaccactgcattctacttggttcctttcccctgtgctgtgtcctggaaattacctaaagggagaaagcaggcaagacttgggggcttgcaccatccgttttcttccttcctggactatttcctacactacctagtgctcaatgaatgaaaccatctttttcatacattttgttcagttttatagttgatcacagcaagaagcaaaatccagtactagttactgcaatatgaccagaaacaaaagtgatcctcggatattatatttatatactaacacaagaagagacaagagcttacattttaatcctcatggattgggagctgtcttgcataaatcagcaaatcctttttctatggtatattacgacctccttaaaatattttgatgttcttataccataatgctataatctagaaaatcaccccagagatgatacatattggaaagactattacttatggtcctcctaagatatcccattaacttccaagttgcgaccttctacctacacactaaccacttcaacattttaatttctggttcagacacctttattgggccttgaccccatcccgttacctactagacatctccccctggctccccagtttcaacagacctagttatttcctttccatcaatcacaccaccatctcttctgcaaccagattttccttctctattcaaagtcacttcttaaaccagatgcttaaaaaaatcaccctatactattccttttcagccatactccatatgcaaagcagtcaccaaaccttatgatttctcccttctagctgttgctcgcatgtcttccccacgtctataatttaggtttctagtattttttgcatggactagtacagtactatggtagctgttcttctctgcacattgccttaattacttctgacctatcttctatatttccattcaaaagatattctaagatgcaatttggtctttatccctattaaaatcccttcaataaagccatatcatttatgagataaacataaagtttcatgacaataaattttgttaatgacctggtatctccttctcatcttttccctttttgttttatgctccaattttacaaaaatattattttagtgagtctttgaggaggctccatttccacctgaaatccctttagctacatctccacctaacaaatccctctcatattttaaaaacacatctcaaatgttgtttcccataggaaatgttctgtggcccccaaatctttttgcagagatataattacccctctattttgtaaatgcttctattgatctacttattacattgcattataatttgtttatatgtcttgtttgtctttaccatattttgtgcctttgaagacatagattcctagtcatctttgaatccctcatgcctatcacagggactcaaatctagtattaacatcaaaaatgtgaatctgggaaactttatgcagcccaaacatggtacatcctttcctttctcctgtaaaggcacaggattcctcactatcctattacagtataaggggagaagcagaatcagaaagacgaaactacagttctggcaggcttgagaaattgtctactaatttaaggttttttctacttgtagtccacaaggtagacagtcctgttctcttccttgttgactaatttgtgctaaagtataatttttaaaggctaaaaatatgattttatgcaaatatgaaatgaacttgttaaagatattctttaactcactagctaatgagggaatcagttcaaagaagggcctgaagaacagacatatatacagtaaggaatgtgaaagaaatttcctaatgatataaataggtaatatctttataggacagcaaaatgtaatgtttgagagtatctcttctatctggcacaaatgaattttatccctaagaagtaagatttatttgcattgatatagaaaaaaacctttcgtgtaactgtcagttctctactatttctacccttacagatttataaactagtctacccaataaaaagtcaaagatgcataccctcataaaatcagttactccagaatattagctacacaatgtgcagcccttagttgtaaagacacctgtaatttccaagtcttgaacattttctttccttacatcaatgaaataatactcctccatttcccagagaaaaagtgatattccccagacgggacatacatgcaactcttaagacattttgaagacttttaattgaaaagtaaaaatgcaaaactttatagagtgaaatgccagaagttttagctttaactttttccactttataaatctaaaaggcacaatcttgtggtagttaatagcatagattctggtgtcaggctgcctgaccgtgcatcaagctccaaggctacctgacctacagcaaggtaaaaactcttgatgctttagttatctcatctgaaaaatgagaatgacggtacttacctcatgtttgtaatcaggattaaatgagttattttcattttatattttgtgtatatacagccttggaacagtgcctggcacatggttaacattataaggatttgtttaacaaaatttgaaagtacaccacggatagaagaaaaggaagaaaggttcacatttaagtctttgaggcatctttatgaacactcatgatagcgactctggacttttattcctattcagttgtcatttaagagaaacgcctccctcctgagttacctaaggccaaagacaattcatgcagataccattcaattttttttgatgctgattctggagggaattttcttcttttgagggaaatccagcatttagtaacctgtggggaataacatttcttatagtggtgaatcgattctactctttgcaaagacaactctaataatactgaaggagcacatacttgagttaagaatggatctgagcacagcagctcatgcctgtaatcccagcactttgggaggcctaggttgggggtatcacttgaggtcagaagttcaagaccagcatggccaacatggtaagacccccgtctctactaaaaatacaaaaattagctgggcgtggtggctggcacgtgtaatcccagctaatctggaggctgagttgggagaatctcttgaacccaggaggcggtggttgcagtgagccgagattgtgccactgcactccagcctgggcggcagagtgagactccgtttcaaaaaaaaaagaaaaaagatctgagacatgaaggacaaagagctctatctccctctaggtactttctgagcctcatatttcccctgagttcagttcatttcactagccagaaatgatcatccagcttgaaatggacttggccatttctgcaaacttaagtacatcaatcagcaatgatttactaataaattgaaaactaaaagcattccacaaacccgtaagctataagtgagagctctacaatgtatgcaacccagaagataggggaactatgtgtcagggtagtggagaaaatggacacaggacaggccacactgccagaatgatgtgcttaccatgcattgtgtggtttttcacaataaacctatgaggtgggtacctcctaagtttatttcctcctaaatttaaggaagcttagatttaattgcttgttaaggtcacacagcaattacactgtgagacttgactgtggattttaccagaacgggaaattcccatttcatcccttctctccagtcttgtggctgtactctgtaagcactccttggggttgtgtgtagcctagaggatgttttcttgccttgagaccaaggacacaagtggtgttacccaagtgaccaaaagaaatctaagcttttatttctacttgccatatttctattcatctcttgatatagtcagagagacttgtttttatttaggagtaggttcagagttattttcaaaatacacattctgtttctcaagaaaaatatattaaaaaccaaatgatttttttttcaattttatttgagccaaaatatatatacttaattttagttatgccagaagtaagtataatttctcagtccaaggatgttaggaagcaacttacagagcatgcttcaaatagaattctcttggcctttgaaggtaactattttcaaacttaatagtagagtcaagcaagaatggacaattagagttttcaaaattgaaaaatattatgtattttatataatcattacctatggtttacagattttatttttatgatacatatctctaagtagtggtacactgaggacatagcaaatatgcaataaatacttattaagctgaagtgaactaacaaaaaccattaattacaccatttctaacaaccaaaccagctattgcttttcagtgttttggtgatacgttggagtaggaagtcatattcaaattggttagatccttggaagaaatagtagtattctgaaaatgaaaacaaattaaatagtttaattccctccctgtatttctttacaacaacaacaacaacacaaatctcttctcatagattatctagaatagatgacctatgggctgtggttcatgcccttaactacacactttgagaggctgagatgggaagactgcttgaggccaggagtttgagatcagcctggccatcatcacaagacctcatctctattttttcatcaaaaaataacaaataaaaaataagatgagatgtgatttgaggacataaaagttgagggcccttggtatcatacccccaaaacgtctaccaacagccagtcatactccaagtggaggactcatgaaacaggatattggacccagctagggcacacaggggctttgatggaggaaacaacactggggaggggagggaatacaaacaaaaaatcttgaccccatgaacagttgcttaggctggtcttgtttgaagacatacgatacaaactcaagcttttcttaacccacccgcagtccccagtccatgagggcctatcagggcagaagggactataggaaaggtcaagagtgcaaggtgtaggaaagggtgagactccagactgcctgagtcttggctgccatgtgctcgcttgcacatactgtgtggctgatgtggtaaaaggaaattccagagactcaggtacatgagaaataggaacaatcacattccctctgcctgctagacaaccctgggaatataccacttgtgccaccagcccctgctcattctaactctcctattcagagccacgtacagtgtgagtttttccttgcggccctatggggaactgcagaaacctgtccctttccaatttggagccctattctctaatcttagaggatttatagctttgaaatgttatttccagtatcttcatggtttcctcatctacttactgtttttagagtagaagactgcatcaattttaggcccgattccttggaagttcttggtaatcagtttgggataaccagggtccatcatctgtctcctttcatcatacctgagcaaagaagtaaccagcaggaactcaatcagaaagtggctttcctgacatgcaccacaaacccaccttctctactgaagagctcttccccaaaggacttaagttgctctgatgaagaaaaccaaggacctaaacagttcactgatttcctctgagtccctataggactcaaacctatgcttcctgactctggttaagtctttttcccactatcccataatacttcctctagtgcttggtcctgctttatagagtctggcatagaaggtgatttggcaacagcataggccccagtgaccgattcttcagttgcctgtcattgccttcttttcaaagctattcactgagacaaaaatacccatttcccccaagaagataataaacaggtcaaggggctaagagccagggaaccaaagggttttatacacacgtttgagagaaattgaaaataaacacttttgtttccaggctgtatggtcatatcctggtttctctcttaaattctcttttaccagcaagtgaaaagagctttgtgtctctctagacttccaagtggcaactgaatctaactgttatcttgtgtttatcaatttggttctctaagtatttatggcttgcttagcactctctcaatggcctttcagggaaaaatcctgggccaagtaggagtggaaaactaaacagaaacactgttcagagttgaaatgccaatgttcataataacaggctacagcaaactacacccatttgtgagctctttggaaagtgttatttgctaaaatcaagttttgtttctcaaacagagctaagggctggtggacaaattcaagtcataagcatccggtattcaattggaattagatattgtgttttaaatgcttaagaataaataacagttgtaaatgtaagcttaacatatatgttatgtctcatgtcaaccaggcaagcaatctaggaaatgactggcttactcagaagaaggaatacagaatcctctcctccttcaaaatgtagacaattgagacaacagagacagacactcaaatgagctcctatcctcacttgaccatatgactttcttttaaggaagatcttgcaggacctcctgacctcctgtcatttagaggatggttgtctcattttgtcttttgaatccagtgattacagaaaggaatctggaaatccataaccctcgaaactgactgtagattaaatacttggtcttgtacatctatgacactattttccaatgtgtttccactatgattaataagatgacattttatttagagtgtttttttaaaaaaaaacacacattatctactatttcatatatcagaaaccaaaaacacaaagaactaagttgacaataactatttcagtcctatattctcttaatctctctccctggaaggtcaaggagctttgggaatttgcgcagaaaatgtgccttctagaaagcctcattccatatctgtttcacaatctgaggggtcgaatgaccaaccattaaaactcacctccaatactggttatctacaaagaagtaggtcctataaaaacgtgggttaaaaacagctgcatcaatttttttcacaaagttaggaaaaccaaaagaatgtatgctcttgggataatttggctctggtcttaaattgctaattaaccagtatttgtcatctgtgaagacaaagaaatagggtaaatttgaattatacaggaagagtaataagaaaatattgatttactataaacaacataattcctttccaacagttataatatttattgcttattgatcttaaacatagtctcttttctatggttcccatggttttttttcacaagtattactattttgtagtttacaaacttttcccagaagttgtatatattacttaggtatttaggctattttagtttacacttcagagcgagccactattaataaaatcaagagtgctttcttggtctatatctattaaaaagtagtagtctcttctcaatttattctcttccttgaagtaaactcaatggcaaaactaaagattagaattacctttaaaaagaaaaacttgatttctggcttcaatttcataagcagcttcaatgccagatggcaaggttggccataaggaagaaattaaattaacactggtctttggtctctcagaaaccttcagccagaagaacctgacatgaaagacatttgacacatgttaaangacaatgtagactcaagaaccatggcatgtgaatgggagggaactgtgaaaagacccaatatttctttccattgtcttcacattctgttccatggatgtctgatgttcatggatccacaagaaaaggatatcaatcaactctttgataataacaatgactttaacaagcaatctggtatacagaaataccctggagcttggaatccagggatctaagcttctggttcgaccctacaattcactcaccagttttgtaacctcaaggaagtcactatcctcaagtgtatcagtcttataatctcaaaaatgggaaatatttgtcctacttgacaaatgttagtcttcccaactgcccctccttaccaccaacatctgcttcagtctgtgttctaagaaagaaaccataagttatcctggaattctctcctccataaccaggaaatcaagtctcttgcataggtactgttttacagtcttggtttcagacttcaccatttttatctatgattaaaatagtctggcttctgtttcttatcttctaaatccccatcccagattcctactgcaaatcgttttttacacaccagttttctagttaaaacacaaatgtaattacacctgtctcctgcttcaaaacctttaagatctcctcactgcctacagaatcgagtccaagttcctgcttacaagtttcatctacttcattttcaattattttccactgttttctgacaaaaaaaatttaaaggcagaaactttaatattggttagatatgaaaatgatcctacctgtctttgaagaaaaagatcttatttcccacggtagtgacagcatcaaaactcaaattggggtcacagagagctggtyctgaattgtcaggatttggcaagcgttggttctcttttgggtctcctgaaaatacatttcgagaagcattagtaaacaaaatctgcattgtagttcagaggaggaacagttatgttttaaatactcaattttcttaatgaacattgcatcaaaatcattttaagctttctataacattcacaggaagtataaagtaaggttttttttccacatggttgcaatatcatggaggaagaaaatctgattatctttactttccttttccagttataatagattgtttaatgtgtgggccttcatcagtaaggcaatggtatcttggatagaaagaacaccagacttgaggcctctggttctgcctctggctctgacgttaacatactaggtctcttgtcctcatctgtataatgaagataatatctgtgtcacctgccacacagggttcttatgcggcttaaaaaaagacagatattaacgttttatccaaatatagatattgttagactattcataaaagcgagtatctttatatggcaaaatgataaagaattcaactcaccatacagggactgaatgccacgtatgtcatcagcagagaggcgaaatgtgttgatgtcaacatatttgtaggtggggaacattacggcctttggatcctctccctatagtaagtcgtattagtgagtcac
